(19) United States
(12) Patent Application Publication
(10) Pub. No.: US 2021/0095275 A1
(43) Pub. Date: Apr. 1, 2021

(54) OLIGONUCLEOTIDES FOR MODULATING GSK3B EXPRESSION

(71) Applicant: Roche Innovation Center Copenhagen A/S, Hørsholm (DK)

(72) Inventors: Peter HAGEDORN, Hørsholm (DK); Lykke PEDERSEN, Copenhagen NV (DK)

(73) Assignee: Roche Innovation Center Copenhagen A/S, Hørsholm (DK)

(21) Appl. No.: 15/733,368

(22) PCT Filed: Jan. 10, 2019
(86) PCT No.: PCT/EP2019/050491

§ 371 Date: Jul. 10, 2020

(30) Foreign Application Priority Data
Jan. 12, 2018 (EP) 18151340.9

(51) Int. Cl. C12N 15/113

(52) U.S. Cl. CPC C12N 15/113; C12N 2310/11; C12N 2310/3231; C12Y 301/26004; C12N 2310/313; C12N 2310/341; C12N 2310/3341; C12N 2310/322

(57) ABSTRACT

The present invention relates to antisense oligonucleotides that are capable of reducing expression of GSK3B in a target cell. The antisense oligonucleotides hybridize to GSK3B pre-mRNA. The present invention further relates to conjugates of the antisense oligonucleotide, pharmaceutical salts and pharmaceutical compositions and methods for treatment or alleviation of conditions such as cancer, inflammatory diseases, neurological diseases, neurological injury, neuronal degeneration, psychiatric diseases and Type 2 diabetes.

### FIELD OF INVENTION

[0001] The present invention relates to oligonucleotides (oligomers) that are complementary to glycogen synthase kinase 3-beta (GSK3B) pre-mRNA. Such oligonucleotides may be used for reducing GSK3B transcript in a cell, leading to reducing of the expression of GSK3B. Modulation of GSK3B expression is beneficial for a range of medical disorders, such as cancer, inflammatory disease, neurological diseases, neurological injury, neuronal degeneration, psychiatric diseases and Type 2 diabetes.

### BACKGROUND

[0002] Glycogen synthase kinase (GSK) is a serine/threonine kinase with two isoforms, alpha and beta. Glycogen synthase kinase-3-beta (GSK3B) was originally identified as a protein kinase which phosphorylated and inactivated glycogen synthase, a key enzyme regulating insulin-stimulated glycogen synthesis (see Embi et al., Eur. J. Biochem. 107, 519-527, (1980); and Vandenheede et al., Biol. Chem. 255, 11768-11774,1980). GSK-3B is inhibited upon insulin activation thereby allowing the activation of glycogen synthase. Therefore, inhibition of GSK-3B stimulates insulin-dependent processes and is useful in the treatment of type 2 diabetes. Currently small molecule drugs such as metformin are used for this purpose. However, they have limited application due to a number of side effects, such as hypoglycemia and anemia. A review of the potential therapeutic uses of GSK3B inhibitors can be found in Beurel et al 2015 Pharmacol Ther. Vol 148 p. 114. Further indications of involvement of GSK3B in diseases can be found in the following disclosures.

[0003] Pei et all, J Neuropathol Exp Neurol, 1997, January; 56(1); 70-8, has determined that levels of GSK3 are about 50% increased in the postsynaptosomal supernatant from Alzheimer's disease brains as compared to heathy controls. King et al 2014 Pharmacol Ther. Vol 141 p. 1 further revies the ability of GSK3B inhibitors to rescue cognitive impairments in relation to neurological diseases, neurological injuries, neuronal degeneration and psychiatric diseases.

[0004] Jiang et al. 2015 Cell Death and Disease Vol 6 e1865, discloses that lowering of GSK3B kinase activity and maintaining lower protein levels of GSK3B in neurons support mammalian axon regeneration in vivo.

[0005] Qiao et al 2014 PLOS One Vol 9 e105624, disclose that the phosphorylation of a GSK3B isoform Ser9-GSK3B is Type 2 diabetes patients are associated with an increased risk of hepatocellular carcinoma (HCC).

[0006] WO05083105 relates to a screening method for identifying compounds that can regulate GSK3B and potentially be applied in a long list of diseases. Antisense oligonucleotides are mentioned as one type of compound that can be screened, there are however no specific examples of any compounds that actually regulates GSK3B in the application.

[0007] Spinnler et al., 2010, Medical Mycology 48 589-597 discloses one siRNA compound targeting mature GSK3B RNA.

[0008] None of the references above discloses a single stranded antisense oligonucleotides targeting GSK3B, and in particular they do not disclose the concept of targeting intron sequences or repeated sequences in the GSK3B gene

[0009] Antisense oligonucleotides targeting repeated sites in the same RNA have been shown to have enhanced potency for downregulation of target mRNA in some cases of in vitro transfection experiments. This has been the case for GCGR, STST3, MAPT, OGFR, and BOK RNA (Vickers at al. PLOS one, October 2014, Volume 9, Issue 10). WO 2013/120003 also refers to modulation of RNA by repeat targeting.

### OBJECTIVE OF THE INVENTION

[0010] GSK3B is involved in the development and progression of a number of diseases, cancer, such as hepatocellular carcinoma (HCC), inflammatory diseases, neurological diseases, such as Alzheimer's disease, neurological injury, neuronal degeneration, psychiatric diseases and Type2 diabetes.

[0011] The present invention provides antisense oligonucleotides capable of modulating GSK3B mRNA and protein expression both in vivo and in vitro. In particular the antisense oligonucleotides targeting repeated sites have higher potency compared to antisense oligonucleotides targeting single regions within the same target sequence. Accordingly, the present invention can potentially be used in combination therapy together with the known standard care therapies and potentially can alleviate symptoms of different diseases, such as Alzheimer's disease, HCC and Type 2 diabetes. Furthermore, the antisense oligonucleotides of the present invention may be used for promoting axon regeneration, thereby improving conditions of patients suffering from the results of traumatic brain injury, stroke, traumatic injury to the peripheral nervous system and related conditions that involve axonal disconnection.

### SUMMARY OF INVENTION

[0012] The present invention provides antisense oligonucleotides, such as gapmer oligonucleotides, which are complementary to a target mammalian GSK3B nucleic acids, and uses thereof.

[0013] The present invention provides antisense oligonucleotides, which comprise contiguous nucleotide sequences, which are complementary to certain regions, or sequences present in target mammalian GSK3B nucleic acids.

[0014] The compounds of the invention are capable of inhibiting mammalian GSK3B target nucleic acid in a cell, which is expressing the mammalian GSK3B nucleic acid.

[0015] The present invention provides for an antisense gapmer oligonucleotide compound targeting a mammalian GSK3B nucleic acid, and in vitro and in vivo uses thereof, and their use in medicine.

[0016] Accordingly, in a first aspect the invention provides an antisense oligonucleotide, of 10 to 50 nucleotides in length, which comprises a contiguous nucleotide sequence of 10 to 30 nucleotides in length with at least 90% complementarity, such as fully complementary, to a mammalian GSK3B target nucleic acid, wherein the antisense oligonucleotide is capable of reducing the expression of the mammalian GSK3B target nucleic acid, in a cell.

[0017] Accordingly, in a further aspect the invention provides the antisense oligonucleotide wherein the contiguous nucleotide sequence is at least 90% complementary, such as fully complementary, to a sequence selected from the group consisting of SEQ ID NO 1, 2, 3 and 4, or a naturally occurring variant thereof.

[0018] In a further aspect, the invention provides the antisense oligonucleotide, wherein the contiguous nucleotide sequence is at least 90% complementary, such as fully complementary, to an intron region present in the pre-mRNA of mammalian GSK3B target nucleic acid (e.g. SEQ ID NO 1).

[0019] In a further aspect the invention provides the antisense oligonucleotide, wherein the contiguous nucleotide sequence is at least 90% complementary, such as fully complementary to a target region of SEQ ID NO 1, selected from the group consisting of position 184511-184530, 184587-184606, 184663-184682, 184739-184758, 184815-184834; 184512-184531, 184588-184607, 184664-184683, 184740-184759, 184816-184835; 184512-184529, 184588-184605, 184664-184681, 184740-184757, 184816-184833; 184513-184528, 184589-184604, 184665-184680, 184741-184756, 184817-184832; 184513-184526, 184589-184602, 184665-184678, 184741-184754, 184817-184830; 184518-184531, 184594-184607, 184670-184683, 184746-184759, 184822-184835; 56154-56173, 56154-56171, 56154-56169, 56154-56167, 267802-267821, 267802-267815, 267804-26821, and 267806-267821 of SEQ ID NO 1.

[0020] In a further aspect, the invention provides antisense oligonucleotides which comprises a wherein the contiguous nucleotide sequence is 95% complementary, such as fully complementary, to a target region of 10-22, such as 14-20, nucleotides in length of the target nucleic acid of SEQ ID NO: 1, wherein the target region is repeated at least 5 or more times across the target nucleic acid.

[0021] In a further aspect the invention provides the antisense oligonucleotide, wherein the antisense oligonucleotide or contiguous nucleotide sequence thereof is selected from the group consisting of TTAgttatcataattcacCC (Compound ID 6_1); AGTTatcataattcacCC (Compound ID 7_1); TTATcataattcACCC (Compound ID 8_1); and ATCAtaattcACCC (Compound ID 9_1); wherein capital letters represent LNA nucleosides, such as beta-D-oxy LNA, lower case letters represent DNA nucleosides, optionally all LNA C are 5-methyl cytosine, and at least one, preferably all internucleoside linkages are phosphorothioate internucleoside linkages.

[0022] In a further aspect the invention provides the antisense oligonucleotide, wherein the antisense oligonucleotide or contiguous nucleotide sequence thereof is selected from the group consisting of TAatggtctctattcagTTC (Compound ID 10_1); CTAatggtctctattcagTT (Compound ID 11_1); AATGgtctctattcaGTT (Compound ID 12_1); AATggtctctattcAGTT (Compound ID 12_2); ATGgtctctattCAGT (Compound ID 13_1); ATggtctctattCAGT (Compound ID 13_2); GGTctctattcAGT (Compound ID 14_1); and CTAAtggtctCTAT (Compound ID 15_1); wherein capital letters represent LNA nucleosides, such as beta-D-oxy LNA, lower case letters represent DNA nucleosides, optionally all LNA C are 5-methyl cytosine, and at least one, preferably all internucleoside linkages are phosphorothioate internucleoside linkages.

[0023] In a further aspect the invention provides the antisense oligonucleotide, wherein the antisense oligonucleotide or contiguous nucleotide sequence thereof is selected from the group consisting of ATGAaattggtttgtaTTTA (Compound ID 16_1); TTGGtttgtaTTTA (Compound ID 17_1), ATGAaattggtttgTATT (Compound ID 18_1), ATGAaattggttTGTA (Compound ID 19_1) wherein capital letters represent LNA nucleosides, such as beta-D-oxy LNA, lower case letters represent DNA nucleosides, optionally all LNA C are 5-methyl cytosine, and at least one, preferably all internucleoside linkages are phosphorothioate internucleoside linkages.

[0024] In a further aspect, the invention provides a conjugate comprising the antisense oligonucleotide according to the invention, and at least one conjugate moiety covalently attached to said oligonucleotide.

[0025] In a further aspect, the invention provides a pharmaceutical composition comprising the oligonucleotide according to the invention or the conjugate according to some aspects of the invention, and a pharmaceutically acceptable diluent, solvent, carrier, salt and/or adjuvant.

[0026] In a further aspect, the invention provides a method for inhibiting a GSK3B expression in the target cell, which is expressing the mammalian GSK3B, said method comprising administering an oligonucleotide, the conjugate, the pharmaceutically acceptable salt, or the pharmaceutical composition according to the invention in an effective amount to said cell.

[0027] In a further aspect, the invention provides a method for treating or preventing a disease comprising administering a therapeutically or prophylactically effective amount of the oligonucleotide, the conjugate, the pharmaceutically acceptable salt, or the pharmaceutical composition according to the invention to a subject suffering from or susceptible to the disease.

[0028] In a further aspect, the invention provides a use of the oligonucleotide, the conjugate, the pharmaceutically acceptable salt, or the pharmaceutical composition for the preparation of a medicament for treatment or prevention of cancer, inflammatory diseases, neurological diseases, neurological injury, neuronal degeneration, psychiatric diseases and Type 2 diabetes.

### Definitions

[0029] Oligonucleotide The term “oligonucleotide” as used herein is defined as it is generally understood by the skilled person as a molecule comprising two or more covalently linked nucleosides. Such covalently bound nucleosides may also be referred to as nucleic acid molecules or oligomers. Oligonucleotides are commonly made in the laboratory by solid-phase chemical synthesis followed by purification. When referring to a sequence of the oligonucleotide, reference is made to the sequence or order of nucleobase moieties, or modifications thereof, of the covalently linked nucleotides or nucleosides. The oligonucleotide of the invention is man-made, and is chemically synthesized, and is typically purified or isolated. The oligonucleotide of the invention may comprise one or more modified nucleosides or nucleotides.

### Antisense Oligonucleotides

[0030] The term “Antisense oligonucleotide” as used herein is defined as oligonucleotides capable of modulating expression of a target gene by hybridizing to a target nucleic acid, in particular to a contiguous sequence on a target nucleic acid. The antisense oligonucleotides are not essentially double stranded and are therefore not siRNAs or shRNAs. Preferably, the antisense oligonucleotides of the present invention are single stranded. It is understood that single stranded oligonucleotides of the present invention can form hairpins or intermolecular duplex structures (duplex between two molecules of the same oligonucleotide), as long as the degree of intra or inter self-complementarity is less than 50% across of the full length of the oligonucleotide

[0031] Advantageously, the antisense oligonucleotide of the invention comprises one or more modified nucleosides or nucleotides.

### Contiguous Nucleotide Sequence

[0032] The term “contiguous nucleotide sequence” refers to the region of the oligonucleotide which is complementary to the target nucleic acid. The term is used interchangeably herein with the term “contiguous nucleobase sequence” and the term “oligonucleotide motif sequence”. In some embodiments all the nucleotides of the oligonucleotide constitute the contiguous nucleotide sequence. In some embodiments the oligonucleotide comprises the contiguous nucleotide sequence, such as a F-G-F′ gapmer region, and may optionally comprise further nucleotide(s), for example a nucleotide linker region which may be used to attach a functional group to the contiguous nucleotide sequence. The nucleotide linker region may or may not be complementary to the target nucleic acid.

[0033] Contiguous sequences according to this invention may be complementary to a contiguous nucleotide sequence at a given position of a target nucleic acid. Thus, the contiguous nucleotide sequence is at least 90%, such as 100% complementary to the suitable length of the target sequence of the invention. Contiguous nucleotide sequence may be therefore complementary to a stretch of 12, 13, 14, 15, 16, 17, 18, 19 or 20 nucleotides on the target sequence.

### Nucleotides

[0034] Nucleotides are the building blocks of oligonucleotides and polynucleotides, and for the purposes of the present invention include both naturally occurring and non-naturally occurring nucleotides. In nature, nucleotides, such as DNA and RNA nucleotides comprise a ribose sugar moiety, a nucleobase moiety and one or more phosphate groups (which is absent in nucleosides). Nucleosides and nucleotides may also interchangeably be referred to as “units” or “monomers”.

### Modified Nucleoside

[0035] The term “modified nucleoside” or “nucleoside modification” as used herein refers to nucleosides modified as compared to the equivalent DNA or RNA nucleoside by the introduction of one or more modifications of the sugar moiety or the (nucleo)base moiety. In a preferred embodiment the modified nucleoside comprise a modified sugar moiety. The term modified nucleoside may also be used herein interchangeably with the term “nucleoside analogue” or modified “units” or modified “monomers”. Nucleosides with an unmodified DNA or RNA sugar moiety are termed DNA or RNA nucleosides herein. Nucleosides with modifications in the base region of the DNA or RNA nucleoside are still generally termed DNA or RNA if they allow Watson Crick base pairing.

### Modified Internucleoside Linkage

[0036] The term “modified internucleoside linkage” is defined as generally understood by the skilled person as linkages other than phosphodiester (PO) linkages, that covalently couples two nucleosides together. The oligonucleotides of the invention may therefore comprise modified internucleoside linkages. In some embodiments, the modified internucleoside linkage increases the nuclease resistance of the oligonucleotide compared to a phosphodiester linkage. For naturally occurring oligonucleotides, the internucleoside linkage includes phosphate groups creating a phosphodiester bond between adjacent nucleosides. Modified internucleoside linkages are particularly useful in stabilizing oligonucleotides for in vivo use, and may serve to protect against nuclease cleavage at regions of DNA or RNA nucleosides in the oligonucleotide of the invention, for example within the gap region of a gapmer oligonucleotide, as well as in regions of modified nucleosides, such as region F and F′.

[0037] In an embodiment, the oligonucleotide comprises one or more internucleoside linkages modified from the natural phosphodiester, such one or more modified internucleoside linkages that is for example more resistant to nuclease attack. Nuclease resistance may be determined by incubating the oligonucleotide in blood serum or by using a nuclease resistance assay (e.g. snake venom phosphodiesterase (SVPD)), both are well known in the art. Internucleoside linkages which are capable of enhancing the nuclease resistance of an oligonucleotide are referred to as nuclease resistant internucleoside linkages. In some embodiments at least 50% of the internucleoside linkages in the oligonucleotide, or contiguous nucleotide sequence thereof, are modified, such as at least 60%, such as at least 70%, such as at least 80 or such as at least 90% of the internucleoside linkages in the oligonucleotide, or contiguous nucleotide sequence thereof, are nuclease resistant internucleoside linkages. In some embodiments all of the internucleoside linkages of the oligonucleotide, or contiguous nucleotide sequence thereof, are nuclease resistant internucleoside linkages. It will be recognized that, in some embodiments the nucleosides which link the oligonucleotide of the invention to a non-nucleotide functional group, such as a conjugate, may be phosphodiester.

[0038] A preferred modified internucleoside linkage for use in the oligonucleotide of the invention is phosphorothioate.

[0039] Phosphorothioate internucleoside linkages are particularly useful due to nuclease resistance, beneficial pharmacokinetics and ease of manufacture. In some embodiments at least 50% of the internucleoside linkages in the oligonucleotide, or contiguous nucleotide sequence thereof, are phosphorothioate, such as at least 60%, such as at least 70%, such as at least 80% or such as at least 90% of the internucleoside linkages in the oligonucleotide, or contiguous nucleotide sequence thereof, are phosphorothioate. In some embodiments, other than the phosphorodithioate internucleoside linkages, all of the internucleoside linkages of the oligonucleotide, or contiguous nucleotide sequence thereof, are phosphorothioate. In some embodiments, the oligonucleotide of the invention comprises both phosphorothioate internucleoside linkages and at least one phosphodiester linkage, such as 2, 3 or 4 phosphodiester linkages, in addition to the phosphorodithioate linkage(s). In a gapmer oligonucleotide, phosphodiester linkages, when present, are suitably not located between contiguous DNA nucleosides in the gap region G.

[0040] Nuclease resistant linkages, such as phosphorothioate linkages, are particularly useful in oligonucleotide regions capable of recruiting nuclease when forming a duplex with the target nucleic acid, such as region G for gapmers. Phosphorothioate linkages may, however, also be useful in non-nuclease recruiting regions and/or affinity enhancing regions such as regions F and F′ for gapmers. Gapmer oligonucleotides may, in some embodiments comprise one or more phosphodiester linkages in region F or F′, or both region F and F′, which the internucleoside linkage in region G may be fully phosphorothioate.

[0041] Advantageously, all the internucleoside linkages in the contiguous nucleotide sequence of the oligonucleotide, or all the internucleoside linkages of the oligonucleotide, are phosphorothioate linkages.

[0042] It is recognized that, as disclosed in EP 2 742 135, antisense oligonucleotides may comprise other internucleoside linkages (other than phosphodiester and phosphorothioate), for example alkyl phosphonate/methyl phosphonate internucleosides, which according to EP 2 742 135 may for example be tolerated in an otherwise DNA phosphorothioate the gap region.

### Nucleobase

[0043] The term nucleobase includes the purine (e.g. adenine and guanine) and pyrimidine (e.g. uracil, thymine and cytosine) moiety present in nucleosides and nucleotides which form hydrogen bonds in nucleic acid hybridization. In the context of the present invention the term nucleobase also encompasses modified nucleobases which may differ from naturally occurring nucleobases, but are functional during nucleic acid hybridization. In this context “nucleobase” refers to both naturally occurring nucleobases such as adenine, guanine, cytosine, thymidine, uracil, xanthine and hypoxanthine, as well as non-naturally occurring variants. Such variants are for example described in Hirao et al (2012) Accounts of Chemical Research vol 45 page 2055 and Bergstrom (2009) Current Protocols in Nucleic Acid Chemistry Suppl. 37 1.4.1.

[0044] In a some embodiments the nucleobase moiety is modified by changing the purine or pyrimidine into a modified purine or pyrimidine, such as substituted purine or substituted pyrimidine, such as a nucleobase selected from isocytosine, pseudoisocytosine, 5-methyl cytosine, 5-thiozolo-cytosine, 5-propynyl-cytosine, 5-propynyl-uracil, 5-bromouracil 5-thiazolo-uracil, 2-thio-uracil, 2′thio-thymine, inosine, diaminopurine, 6-aminopurine, 2-aminopurine, 2,6-diaminopurine and 2-chloro-6-aminopurine.

[0045] The nucleobase moieties may be indicated by the letter code for each corresponding nucleobase, e.g. A, T, G, C or U, wherein each letter may optionally include modified nucleobases of equivalent function. For example, in the exemplified oligonucleotides, the nucleobase moieties are selected from A, T, G, C, and 5-methyl cytosine. Optionally, for LNA gapmers, 5-methyl cytosine LNA nucleosides may be used.

### Modified Oligonucleotide

[0046] The term modified oligonucleotide describes an oligonucleotide comprising one or more sugar-modified nucleosides and/or modified internucleoside linkages. The term chimeric” oligonucleotide is a term that has been used in the literature to describe oligonucleotides with modified nucleosides.

### Complementarity

[0047] The term “complementarity” describes the capacity for Watson-Crick base-pairing of nucleosides/nucleotides. Watson-Crick base pairs are guanine (G)-cytosine (C) and adenine (A)-thymine (T)/uracil (U). It will be understood that oligonucleotides may comprise nucleosides with modified nucleobases, for example 5-methyl cytosine is often used in place of cytosine, and as such the term complementarity encompasses Watson Crick base-paring between non-modified and modified nucleobases (see for example Hirao et al (2012) Accounts of Chemical Research vol 45 page 2055 and Bergstrom (2009) Current Protocols in Nucleic Acid Chemistry Suppl. 37 1.4.1).

[0048] The term “% complementary” as used herein, refers to the proportion of nucleotides (in percent) of a contiguous nucleotide sequence in a nucleic acid molecule (e.g. oligonucleotide) which across the contiguous nucleotide sequence, are complementary to a reference sequence (e.g. a target sequence or sequence motif). The percentage of complementarity is thus calculated by counting the number of aligned nucleobases that are complementary (from Watson Crick base pair) between the two sequences (when aligned with the target sequence 5′-3′ and the oligonucleotide sequence from 3′-5′), dividing that number by the total number of nucleotides in the oligonucleotide and multiplying by 100. In such a comparison a nucleobase/nucleotide which does not align (form a base pair) is termed a mismatch. Insertions and deletions are not allowed in the calculation of % complementarity of a contiguous nucleotide sequence. It will be understood that in determining complementarity, chemical modifications of the nucleobases are disregarded as long as the functional capacity of the nucleobase to form Watson Crick base pairing is retained (e.g. 5′-methyl cytosine is considered identical to a cytosine for the purpose of calculating % identity).

[0049] The term “fully complementary”, refers to 100% complementarity.

[0050] The following is an example of an oligonucleotide (SEQ ID NO: 10) that is fully complementary to the target nucleic acid (SEQ ID NO: 5).

(SEQ ID NO: 5)
5′ AGAAGGAACTGAATAGAGACCATTAGCTTTAATCAT 3′
(SEQ ID NO: 10)
3′ CTTGACTTATCTCTGGTAAT 5′

### Identity

[0051] The term “Identity” as used herein, refers to the proportion of nucleotides (expressed in percent) of a contiguous nucleotide sequence in a nucleic acid molecule (e.g. oligonucleotide) which across the contiguous nucleotide sequence, are identical to a reference sequence (e.g. a sequence motif). The percentage of identity is thus calculated by counting the number of aligned bases that are identical (a match) between two sequences (in the contiguous nucleotide sequence of the compound of the invention and in the reference sequence), dividing that number by the total number of nucleotides in the oligonucleotide and multiplying by 100. Therefore, Percentage of Identity=(Matches×100)/Length of aligned region (e.g. the contiguous nucleotide sequence). Insertions and deletions are not allowed in the calculation the percentage of identity of a contiguous nucleotide sequence. It will be understood that in determining identity, chemical modifications of the nucleobases are disregarded as long as the functional capacity of the nucleobase to form Watson Crick base pairing is retained (e.g. 5-methyl cytosine is considered identical to a cytosine for the purpose of calculating % identity).

### Hybridization

[0052] The term “hybridizing” or “hybridizes” as used herein is to be understood as two nucleic acid strands (e.g. an oligonucleotide and a target nucleic acid) forming hydrogen bonds between base pairs on opposite strands thereby forming a duplex. The affinity of the binding between two nucleic acid strands is the strength of the hybridization. It is often described in terms of the melting temperature (Tₘ) defined as the temperature at which half of the oligonucleotides are duplexed with the target nucleic acid. At physiological conditions Tₘ is not strictly proportional to the affinity (Mergny and Lacroix, 2003, Oligonucleotides 13:515-537). The standard state Gibbs free energy ΔG° is a more accurate representation of binding affinity and is related to the dissociation constant (K_{d}) of the reaction by ΔG°=-RTIn(K_{d}), where R is the gas constant and T is the absolute temperature. Therefore, a very low ΔG° of the reaction between an oligonucleotide and the target nucleic acid reflects a strong hybridization between the oligonucleotide and target nucleic acid. ΔG° is the energy associated with a reaction where aqueous concentrations are 1M, the pH is 7, and the temperature is 37° C. The hybridization of oligonucleotides to a target nucleic acid is a spontaneous reaction and for spontaneous reactions ΔG° is less than zero. ΔG° can be measured experimentally, for example, by use of the isothermal titration calorimetry (ITC) method as described in Hansen et al., 1965, Chem. Comm. 36-38 and Holdgate et al., 2005, Drug Discov Today. The skilled person will know that commercial equipment is available for ΔG° measurements. ΔG° can also be estimated numerically by using the nearest neighbor model as described by SantaLucia, 1998, Proc Natl Acad Sci USA. 95: 1460-1465 using appropriately derived thermodynamic parameters described by Sugimoto et al., 1995, Biochemistry 34:11211-11216 and McTigue et al., 2004, Biochemistry 43:5388-5405. In order to have the possibility of modulating its intended nucleic acid target by hybridization, oligonucleotides of the present invention hybridize to a target nucleic acid with estimated ΔG° values below −10 kcal for oligonucleotides that are 10-30 nucleotides in length. In some embodiments the degree or strength of hybridization is measured by the standard state Gibbs free energy ΔG°. The oligonucleotides may hybridize to a target nucleic acid with estimated ΔG° values below the range of −10 kcal, such as below −15 kcal, such as below −20 kcal and such as below −25 kcal for oligonucleotides that are 8-30 nucleotides in length. In some embodiments the oligonucleotides hybridize to a target nucleic acid with an estimated ΔG° value of −10 to −60 kcal, such as −12 to −40, such as from −15 to −30 kcal or −16 to −27 kcal such as −18 to −25 kcal.

### Target Nucleic Acid

[0053] According to the present invention, the target nucleic acid is a nucleic acid, which encodes mammalian GSK3B and may for example be a gene, a RNA, a mRNA, and pre-mRNA, a mature mRNA or a cDNA sequence. The target may therefore be referred to as a GSK3B target nucleic acid.

[0054] The oligonucleotide of the invention may for example target exon regions of a mammalian GSK3B, or may preferably target intron region in the GSK3B pre-mRNA (see, for example Table 1).

TABLE 1
Exon and inron regions in the human GSK3B pre-mRNA

| | |
|---|---|
| Exonic regions in the | Intronic regions in the |
| human GSK3B premRNA | human GSK3B premRNA |
| (SEQ ID NO: 1) | (SEQ ID NO: 1) |

| ID | start | end | ID | start | end |
|---|---|---|---|---|---|
| E10 | 1 | 1071 | I1 | 1072 | 92178 |
| E2 | 92179 | 92372 | I2 | 92373 | 147066 |
| E3 | 147067 | 147150 | I3 | 147151 | 170934 |
| E4 | 170935 | 171045 | I4 | 171046 | 178243 |
| E5 | 178244 | 178374 | I5 | 178375 | 181607 |
| E6 | 181608 | 181714 | I6 | 181715 | 188565 |
| E7 | 188566 | 188663 | I7 | 188664 | 217909 |
| E8 | 217910 | 218005 | I8 | 218006 | 230812 |
| E9 | 230813 | 230999 | I9 | 231000 | 251064 |
| E10 | 251065 | 251163 | I10 | 251164 | 267562 |
| E11 | 267563 | 273095 | I11 | | |

[0055] Suitably, the target nucleic acid encodes an GSK3B protein, in particular mammalian GSK3B, such as human GSK3B (See for example Tables 1 and 2) which provides the genomic sequence, the mature mRNA and pre-mRNA sequences for human, monkey and mouse GSK3B).

[0056] In some embodiments, the target nucleic acid is selected from the group consisting of SEQ IDs NO: 1, 2, 3 and 4 or naturally occurring variants thereof (e.g. sequences encoding a mammalian GSK3B protein.

[0057] The target nucleic acid may, in some embodiments, be a RNA or DNA, such as a messenger RNA, such as a mature mRNA or a pre-mRNA which encodes mammalian GSK3B protein, such as human GSK3B, e.g. the human pre-mRNA sequence, such as that disclosed as SEQ ID NO: 1, or human mature mRNA as disclosed in SEQ ID NO: 2 and SEQ ID NO: 3.

[0058] If employing the oligonucleotide of the invention in research or diagnostics the target nucleic acid may be a cDNA or a synthetic nucleic acid derived from DNA or RNA.

[0059] For in vivo or in vitro application, the oligonucleotide of the invention is typically capable of inhibiting the expression of the GSK3B target nucleic acid in a cell which is expressing the GSK3B target nucleic acid. The contiguous sequence of nucleobases of the oligonucleotide of the invention is typically complementary to the GSK3B target nucleic acid, as measured across the length of the oligonucleotide, optionally with the exception of one or two mismatches, and optionally excluding nucleotide based linker regions which may link the oligonucleotide to an optional functional group such as a conjugate, or other non-complementary terminal nucleotides (e.g. region D′ or D″).

[0060] Further information on genome and assembly of GSK3B across species is provided in Table 2, and sequence details for pre-mRNA and mRNA in Table 3.

TABLE 2
Genome and assembly information for GSK-3B across species.

| | | | Genomic coordinates | | | |
|---|---|---|---|---|---|---|
| Species | Chr. | Strand | Start | End | Assembly | Ensemble ID |
| Human | 3 | rev | 119821323 | 120094417 | GRCh38.p2 | ENSG00000082701 |
| | | | | | release 107 | |
| mmusculus | 16 | fwd | 38089001 | 38246084 | GRCm38.p5 | ENSMUSG00000022812 |
| rnorvegicus | 11 | rev | 65066235 | 65209268 | Rnor_6.0 | ENSRNOG00000002833 |
| Cynomolgus | 2 | fwd | 152093275 | 152365261 | Macaca_fascicularis | |
| monkey | | | | | 5.0 release 100 | |
| | | | | | (GCF_000364345.1) | |

Fwd = forward strand. The genome coordinates provide the pre-mRNA sequence (genomic sequence).

TABLE 3
Sequence details for GSK3B across species.

| | | Length | SEQ |
|---|---|---|---|
| Species | RNA type | (nt) | ID NO |
| Human | premRNA | 273095 | 1 |
| Human | mRNA | 7711 | 2 |
| Human | mRNA | 1636 | 3 |
| Monkey | premRNA | 271987 | 4 |

Note
SEQ ID NO 4 comprises regions of multiple NNNNs, where the sequencing has been unable to accurately refine the sequence, and a degenerate sequence is therefore included. For the avoidance of doubt, the compounds of the invention are complementary to the actual cynomonkey target sequence and are not therefore degenerate compounds.

### Target Sequence

[0061] The term “target sequence” as used herein refers to a sequence of nucleotides present in the target nucleic acid, which comprises the nucleobase sequence, which is complementary to the antisense oligonucleotide of the invention. In some embodiments, the target sequence consists of a region on the target nucleic acid, which is complementary to the contiguous nucleotide sequence of the antisense oligonucleotide of the invention. This region of the target nucleic acid may be referred to as the target nucleotide sequence. In some embodiments the target sequence is longer than the contiguous complementary sequence of a single oligonucleotide, and may, for example represent a preferred region of the target nucleic acid which may be targeted by several oligonucleotides of the invention.

[0062] The antisense oligonucleotide of the invention comprises a contiguous nucleotide sequence, which is complementary to the target nucleic acid, such as a target sequence described herein.

[0063] In some embodiments the target sequence is conserved between human and monkey, in particular a sequence that is present in both SEQ ID NO: 1 and SEQ ID NO: 4. In a preferred embodiment, the target sequence is present in SEQ ID NO: 5.

[0064] The target sequence to which the oligonucleotide is complementary generally comprises a contiguous nucleobase sequence of at least 10 nucleotides. The contiguous nucleotide sequence is between 10 to 50 nucleotides, such as 12 to 30, such as 14 to 20, such as 15 to 18 contiguous nucleotides

[0065] In one embodiment of the invention the target sequence is SEQ ID NO: 5.

[0066] In another embodiment of the invention the target sequence is SEQ ID NO: 20.

### Repeated Target Region

[0067] The target region or target sequence can be unique for the target nucleic acid (only present once).

[0068] In some aspects of the invention the target region is repeated at least two times over the span of target nucleic acid. Repeated as encompassed by the present invention means that there are at least two identical nucleotide sequences (target regions) of at least 10, such as at least 11, or at least 12, nucleotides in length which occur in the target nucleic acid at different positions. Each repeated target region is separated from the identical region by at least one nucleobase on the contiguous sequence of target nucleic acid and is positioned at different and non-overlapping positions within the target nucleic acid.

### Target Cell

[0069] The term a “target cell” as used herein refers to a cell which is expressing the target nucleic acid. In some embodiments the target cell may be in vivo or in vitro. In some embodiments the target cell is a mammalian cell such as a rodent cell, such as a mouse cell or a rat cell, or a primate cell such as a monkey cell or a human cell.

[0070] In some preferred embodiments the target cell expresses GSK3B mRNA, such as the GSK3B pre-mRNA or GSK3B mature mRNA. The poly A tail of GSK3B mRNA is typically disregarded for antisense oligonucleotide targeting.

### Naturally Occurring Variant

[0071] The term “naturally occurring variant” refers to variants of GSK3B gene or transcripts which originate from the same genetic loci as the target nucleic acid and is a directional transcript from the same chromosomal position and direction as the target nucleic acid, but may differ for example, by virtue of degeneracy of the genetic code causing a multiplicity of codons encoding the same amino acid, or due to alternative splicing of pre-mRNA, or the presence of polymorphisms, such as single nucleotide polymorphisms, and allelic variants. Based on the presence of the sufficient complementary sequence to the oligonucleotide, the oligonucleotide of the invention may therefore target the target nucleic acid and naturally occurring variants thereof.

[0072] In some embodiments, the naturally occurring variants have at least 95% such as at least 98% or at least 99% homology to a mammalian GSK3B target nucleic acid, such as a target nucleic acid selected form the group consisting of SEQ ID NO: 1, 2, 3 and 4.

### Modulation of Expression

[0073] The term “modulation of expression” as used herein is to be understood as an overall term for an antisense oligonucleotide's ability to alter the amount of GSK3B when compared to the amount of GSK3B before administration of the antisense oligonucleotide. Alternatively modulation of expression may be determined by reference to a control experiment. It is generally understood that the control is an individual or target cell treated with a saline composition or an individual or target cell treated with a non-targeting oligonucleotide (mock).

[0074] A modulation according to the present invention shall be understood as an antisense oligonucleotide's ability to inhibit, down-regulate, reduce, suppress, remove, stop, block, prevent, lessen, lower, avoid or terminate expression of mammalian GSK3B, e.g. by degradation of mRNA or blockage of transcription.

### High Affinity Modified Nucleosides

[0075] A high affinity modified nucleoside is a modified nucleotide which, when incorporated into the oligonucleotide enhances the affinity of the oligonucleotide for its complementary target, for example as measured by the melting temperature (Tₘ). A high affinity modified nucleoside of the present invention preferably result in an increase in melting temperature between +0.5 to +12° C., more preferably between +1.5 to +10° C. and most preferably between +3 to +8° C. per modified nucleoside. Numerous high affinity modified nucleosides are known in the art and include for example, many 2′ substituted nucleosides as well as locked nucleic acids (LNA) (see e.g. Freier & Altmann; Nucl. Acid Res., 1997, 25, 4429-4443 and Uhlmann; Curr. Opinion in Drug Development, 2000, 3(2), 293-213).

### Sugar Modifications

[0076] The oligomer of the invention may comprise one or more nucleosides which have a modified sugar moiety, i.e. a modification of the sugar moiety when compared to the ribose sugar moiety found in DNA and RNA.

[0077] Numerous nucleosides with modification of the ribose sugar moiety have been made, primarily with the aim of improving certain properties of oligonucleotides, such as affinity and/or nuclease resistance.

[0078] Such modifications include those where the ribose ring structure is modified, e.g. by replacement with a hexose ring (HNA), or a bicyclic ring, which typically have a biradicle bridge between the C2 and C4 carbons on the ribose ring (LNA), or an unlinked ribose ring which typically lacks a bond between the C2 and C3 carbons (e.g. UNA). Other sugar modified nucleosides include, for example, bicyclohexose nucleic acids (WO2011/017521) or tricyclic nucleic acids (WO2013/154798). Modified nucleosides also include nucleosides where the sugar moiety is replaced with a non-sugar moiety, for example in the case of peptide nucleic acids (PNA), or morpholino nucleic acids.

[0079] Sugar modifications also include modifications made via altering the substituent groups on the ribose ring to groups other than hydrogen, or the 2′-OH group naturally found in DNA and RNA nucleosides. Substituents may, for example be introduced at the 2′, 3′, 4′ or 5′ positions. Nucleosides with modified sugar moieties also include 2′ modified nucleosides, such as 2′ substituted nucleosides. Indeed, much focus has been spent on developing 2′ substituted nucleosides, and numerous 2′ substituted nucleosides have been found to have beneficial properties when incorporated into oligonucleotides, such as enhanced nucleoside resistance and enhanced affinity.

### 2′ Modified Nucleosides.

[0080] A 2′ sugar modified nucleoside is a nucleoside which has a substituent other than H or —OH at the 2′ position (2′ substituted nucleoside) or comprises a 2′ linked biradicle, and includes 2′ substituted nucleosides and LNA (2′-4′ biradicle bridged) nucleosides. For example, the 2′ modified sugar may provide enhanced binding affinity and/or increased nuclease resistance to the oligonucleotide. Examples of 2′ substituted modified nucleosides are 2′-O-alkyl-RNA, 2′-O-methyl-RNA, 2′-alkoxy-RNA, 2′-O-methoxyethyl-RNA (MOE), 2′-amino-DNA, 2′-Fluoro-RNA, and 2′-F-ANA nucleoside. For further examples, please see e.g. Freier & Altmann; Nucl. Acid Res., 1997, 25, 4429-4443 and Uhlmann; Curr. Opinion in Drug Development, 2000, 3(2), 293-213, and Deleavey and Damha, Chemistry and Biology 2012, 19, 937. Below are illustrations of some 2′ substituted modified nucleosides.

[chemical structure]

### Locked Nucleic Acid Nucleosides (LNA).

[0081] A “LNA nucleoside” is a 2′-modified nucleoside which comprises a biradical linking the C2′ and C4′ of the ribose sugar ring of said nucleoside (also referred to as a “2′-4′ bridge”), which restricts or locks the conformation of the ribose ring. These nucleosides are also termed bridged nucleic acid or bicyclic nucleic acid (BNA) in the literature. The locking of the conformation of the ribose is associated with an enhanced affinity of hybridization (duplex stabilization) when the LNA is incorporated into an oligonucleotide for a complementary RNA or DNA molecule. This can be routinely determined by measuring the melting temperature of the oligonucleotide/complement duplex.

[0082] Non limiting, exemplary LNA nucleosides are disclosed in WO 99/014226, WO 00/66604, WO 98/039352, WO 2004/046160, WO 00/047599, WO 2007/134181, WO 2010/077578, WO 2010/036698, WO 2007/090071, WO 2009/006478, WO 2011/156202, WO 2008/154401, WO 2009/067647, WO 2008/150729, Morita et al., Bioorganic & Med. Chem. Lett. 12, 73-76, Seth et al. J. Org. Chem. 2010, Vol 75(5) pp. 1569-81 and Mitsuoka et al., Nucleic Acids Research 2009, 37(4), 1225-1238.

[0083] The 2′-4′ bridge comprises 2 to 4 bridging atoms and is in particular of formula —X—Y—, X being linked to C4′ and Y linked to C2′,
[0084] wherein
[0085] X is oxygen, sulfur, —CR^{a}R^{b}—, —C(R^{a})═C(R^{b}), —C(═CR^{a}R^{b}), —C(R^{a})=N—, —Si(R^{a})₂—, —SO₂—, —NR^{a}—; —O—NR^{a}—, —NR^{a}—O—, —C(=J)-, Se, —O—NR^{a}—, —NR^{a}—CR^{a}R^{b}—, —N(R^{a})—O— or —O—CR^{a}R^{b}—
[0086] Y is oxygen, sulfur, —(CR^{a}R^{b})ₙ—, —CR^{a}R^{b}—O—CR^{a}R^{b}—, —C(R^{a})═C(R^{b}), —C(R^{a})=N—, —Si(R^{a})₂—, —SO₂—, —NR^{a}—, —C(=J)-, Se, —O—NR^{a}—, —NR^{a}—CR^{a}R^{b}—, —N(R^{a})—O— or —O—CR^{a}R^{b}—;
[0087] with the proviso that —X—Y— is not —O—O—, Si(R^{a})₂—Si(R^{a})₂—, —S₂SO₂—, —C(R^{a})═C(R^{b})—C(R^{a})═C(R^{b}), —C(R^{a})═N—C(R^{a})=N—, —C(R^{a})═N—C(R^{a})═C(R^{b}), —C(R^{a})═C(R^{b})—C(R^{a})=N— or —Se—Se—;
[0088] J is oxygen, sulfur, ═CH₂ or ═N(R^{a});
[0089] R^{a} and R^{b} are independently selected from hydrogen, halogen, hydroxyl, cyano, thiohydroxyl, alkyl, substituted alkyl, alkenyl, substituted alkenyl, alkynyl, substituted alkynyl, alkoxy, substituted alkoxy, alkoxyalkyl, alkenyloxy, carboxyl, alkoxycarbonyl, alkylcarbonyl, formyl, aryl, heterocyclyl, amino, alkylamino, carbamoyl, alkylaminocarbonyl, aminoalkylaminocarbonyl, alkylaminoalkylaminocarbonyl, alkylcarbonylamino, carbamido, alkanoyloxy, sulfonyl, alkylsulfonyloxy, nitro, azido, thiohydroxylsulfidealkylsulfanyl, aryloxycarbonyl, aryloxy, arylcarbonyl, heteroaryl, heteroaryloxycarbonyl, heteroaryloxy, heteroarylcarbonyl, —OC(═X^{a})R^{c}, —OC(═X^{a})NR^{c}R^{d} and —NR^{e}C(═X^{a})NR^{c}R^{d};
[0090] or two geminal R^{a} and R^{b} together form optionally substituted methylene;
[0091] or two geminal R^{a} and R^{b}, together with the carbon atom to which they are attached, form cycloalkyl or halocycloalkyl, with only one carbon atom of —X—Y—;
[0092] wherein substituted alkyl, substituted alkenyl, substituted alkynyl, substituted alkoxy and substituted methylene are alkyl, alkenyl, alkynyl and methylene substituted with 1 to 3 substituents independently selected from halogen, hydroxyl, alkyl, alkenyl, alkynyl, alkoxy, alkoxyalkyl, alkenyloxy, carboxyl, alkoxycarbonyl, alkylcarbonyl, formyl, heterocylyl, aryl and heteroaryl;
[0093] X^{a} is oxygen, sulfur or —NR^{c};
[0094] R^{c}, R^{d} and Re are independently selected from hydrogen and alkyl; and
[0095] n is 1, 2 or 3.

[0096] In a further particular embodiment of the invention, X is oxygen, sulfur, —NR^{a}—, —CR^{a}R^{b}— or —C(═CR^{a}R^{b})—, particularly oxygen, sulfur, —NH—, —CH₂— or —C(═CH₂)—, more particularly oxygen.

[0097] In another particular embodiment of the invention, Y is —CR^{a}R^{b}—, —CR^{a}R^{b}—CR^{a}R^{b}— or —CR^{a}R^{b}—CR^{a}R^{b}—CR^{a}R^{b}—, particularly —CH₂—CHCH₃—, —CHCH₃—CH₂—, —CH₂—CH₂— or —CH₂—CH₂—CH₂—.

[0098] In a particular embodiment of the invention, —X—Y— is —O—(CR^{a}R^{b})ₙ—, —S—CR^{a}R^{b}—, —N(R^{a})CR^{a}R^{b}—, —CR^{a}R^{b}—CR^{a}R^{b}—, —O—CR^{a}R^{b}—O—CR^{a}R^{b}—, —CR^{a}R^{b}—O—CR^{a}R^{b}—, —C(═CR^{a}R^{b})—CR^{a}R^{b}—, —N(R^{a})CR^{a}R^{b}—, —O—N(R^{a})—CR^{a}R^{b}— or —N(R^{a})—O—CR^{a}R^{b}—.

[0099] In a particular embodiment of the invention, R^{a} and R^{b} are independently selected from the group consisting of hydrogen, halogen, hydroxyl, alkyl and alkoxyalkyl, in particular hydrogen, halogen, alkyl and alkoxyalkyl.

[0100] In another embodiment of the invention, R^{a} and R^{b} are independently selected from the group consisting of hydrogen, fluoro, hydroxyl, methyl and —CH₂—O—CH₃, in particular hydrogen, fluoro, methyl and —CH₂—O—CH₃.

[0101] Advantageously, one of R^{a} and R^{b} of —X—Y— is as defined above and the other ones are all hydrogen at the same time.

[0102] In a further particular embodiment of the invention, R^{a} is hydrogen or alkyl, in particular hydrogen or methyl.

[0103] In another particular embodiment of the invention, R^{b} is hydrogen or alkyl, in particular hydrogen or methyl.

[0104] In a particular embodiment of the invention, one or both of R^{a} and R^{b} are hydrogen.

[0105] In a particular embodiment of the invention, only one of R^{a} and R^{b} is hydrogen.

[0106] In one particular embodiment of the invention, one of R^{a} and R^{b} is methyl and the other one is hydrogen.

[0107] In a particular embodiment of the invention, R^{a} and R^{b} are both methyl at the same time.

[0108] In a particular embodiment of the invention, —X—Y— is —O—CH₂—, —S—CH₂—, —S—CH(CH₃)—, —NH—CH₂—, —O—CH₂CH₂—, —O—CH(CH₂—O—CH₃)—, —O—CH(CH₂CH₃)—, —O—CH(CH₃)—, —O—CH₂—O—CH₂—, —O—CH₂—O—CH₂—, —CH₂—O—CH₂—, —C(═CH₂)CH₂—, —C(═CH₂)CH(CH₃)—, —N(OCH₃)CH₂— or —N(CH₃)CH₂—;

[0109] In a particular embodiment of the invention, —X—Y— is —O—CR^{a}R^{b}— wherein R^{a} and R^{b} are independently selected from the group consisting of hydrogen, alkyl and alkoxyalkyl, in particular hydrogen, methyl and —CH₂—O—CH₃.

[0110] In a particular embodiment, —X—Y— is —O—CH₂— or —O—CH(CH₃)—, particularly —O—CH₂—.

[0111] The 2′-4′ bridge may be positioned either below the plane of the ribose ring (beta-D-configuration), or above the plane of the ring (alpha-L-configuration), as illustrated in formula (A) and formula (B) respectively.

[0112] The LNA nucleoside according to the invention is in particular of formula (A) or (B)

[chemical structure]

[0113] wherein
[0114] W is oxygen, sulfur, —N(R^{a})— or —CR^{a}R^{b}—, in particular oxygen;
[0115] B is a nucleobase or a modified nucleobase;
[0116] Z is an internucleoside linkage to an adjacent nucleoside or a 5′-terminal group;
[0117] Z* is an internucleoside linkage to an adjacent nucleoside or a 3′-terminal group;
[0118] R¹, R², R³, R⁵ and R⁵* are independently selected from hydrogen, halogen, alkyl, haloalkyl, alkenyl, alkynyl, hydroxy, alkoxy, alkoxyalkyl, azido, alkenyloxy, carboxyl, alkoxycarbonyl, alkylcarbonyl, formyl and aryl; and
[0119] X, Y, R^{a} and R^{b} are as defined above.

[0120] In a particular embodiment, in the definition of —X—Y—, R^{a} is hydrogen or alkyl, in particular hydrogen or methyl. In another particular embodiment, in the definition of —X—Y—, R^{b} is hydrogen or alkyl, in particular hydrogen or methyl. In a further particular embodiment, in the definition of —X—Y—, one or both of R^{a} and R^{b} are hydrogen. In a particular embodiment, in the definition of —X—Y—, only one of R^{a} and R^{b} is hydrogen. In one particular embodiment, in the definition of —X—Y—, one of R^{a} and R^{b} is methyl and the other one is hydrogen. In a particular embodiment, in the definition of —X—Y—, R^{a} and R^{b} are both methyl at the same time.

[0121] In a further particular embodiment, in the definition of X, R^{a} is hydrogen or alkyl, in particular hydrogen or methyl. In another particular embodiment, in the definition of X, R^{b} is hydrogen or alkyl, in particular hydrogen or methyl. In a particular embodiment, in the definition of X, one or both of R^{a} and R^{b} are hydrogen. In a particular embodiment, in the definition of X, only one of R^{a} and R^{b} is hydrogen. In one particular embodiment, in the definition of X, one of R^{a} and R^{b} is methyl and the other one is hydrogen. In a particular embodiment, in the definition of X, R^{a} and R^{b} are both methyl at the same time.

[0122] In a further particular embodiment, in the definition of Y, R^{a} is hydrogen or alkyl, in particular hydrogen or methyl. In another particular embodiment, in the definition of Y, R^{b} is hydrogen or alkyl, in particular hydrogen or methyl. In a particular embodiment, in the definition of Y, one or both of R^{a} and R^{b} are hydrogen. In a particular embodiment, in the definition of Y, only one of R^{a} and R^{b} is hydrogen. In one particular embodiment, in the definition of Y, one of R^{a} and R^{b} is methyl and the other one is hydrogen. In a particular embodiment, in the definition of Y, R^{a} and R^{b} are both methyl at the same time.

[0123] In a particular embodiment of the invention R¹, R², R³, R⁵ and R⁵* are independently selected from hydrogen and alkyl, in particular hydrogen and methyl.

[0124] In a further particular advantageous embodiment of the invention, R¹, R², R³, R⁵ and R⁵* are all hydrogen at the same time.

[0125] In another particular embodiment of the invention, R¹, R², R³, are all hydrogen at the same time, one of R⁵ and R⁵* is hydrogen and the other one is as defined above, in particular alkyl, more particularly methyl.

[0126] In a particular embodiment of the invention, R⁵ and R⁵* are independently selected from hydrogen, halogen, alkyl, alkoxyalkyl and azido, in particular from hydrogen, fluoro, methyl, methoxyethyl and azido. In particular advantageous embodiments of the invention, one of R⁵ and R⁵* is hydrogen and the other one is alkyl, in particular methyl, halogen, in particular fluoro, alkoxyalkyl, in particular methoxyethyl or azido; or R⁵ and R⁵* are both hydrogen or halogen at the same time, in particular both hydrogen of fluoro at the same time. In such particular embodiments, W can advantageously be oxygen, and —X—Y— advantageously —O—CH₂—.

[0127] In a particular embodiment of the invention, —X—Y— is —O—CH₂—, W is oxygen and R¹, R², R³, R⁵ and R⁵* are all hydrogen at the same time. Such LNA nucleosides are disclosed in WO 99/014226, WO 00/66604, WO 98/039352 and WO 2004/046160 which are all hereby incorporated by reference, and include what are commonly known in the art as beta-D-oxy LNA and alpha-L-oxy LNA nucleosides.

[0128] In another particular embodiment of the invention, —X—Y— is —S—CH₂—, W is oxygen and R¹, R², R³, R⁵ and R⁵* are all hydrogen at the same time. Such thio LNA nucleosides are disclosed in WO 99/014226 and WO 2004/046160 which are hereby incorporated by reference.

[0129] In another particular embodiment of the invention, —X—Y— is —NH—CH₂—, W is oxygen and R¹, R², R³, R⁵ and R⁵* are all hydrogen at the same time. Such amino LNA nucleosides are disclosed in WO 99/014226 and WO 2004/046160 which are hereby incorporated by reference.

[0130] In another particular embodiment of the invention, —X—Y— is —O—CH₂CH₂— or —OCH₂CH₂CH₂—, W is oxygen, and R¹, R², R³, R⁵ and R⁵* are all hydrogen at the same time. Such LNA nucleosides are disclosed in WO 00/047599 and Morita et al., Bioorganic & Med. Chem. Lett. 12, 73-76, which are hereby incorporated by reference, and include what are commonly known in the art as 2′-O-4′C-ethylene bridged nucleic acids (ENA).

[0131] In another particular embodiment of the invention, —X—Y— is —O—CH₂—, W is oxygen, R¹, R², R³ are all hydrogen at the same time, one of R⁵ and R⁵* is hydrogen and the other one is not hydrogen, such as alkyl, for example methyl. Such 5′ substituted LNA nucleosides are disclosed in WO 2007/134181 which is hereby incorporated by reference.

[0132] In another particular embodiment of the invention, —X—Y— is —O—CR^{a}R^{b}—, wherein one or both of R^{a} and R^{b} are not hydrogen, in particular alkyl such as methyl, W is oxygen, R¹, R², R³ are all hydrogen at the same time, one of R⁵ and R⁵* is hydrogen and the other one is not hydrogen, in particular alkyl, for example methyl. Such bis modified LNA nucleosides are disclosed in WO 2010/077578 which is hereby incorporated by reference.

[0133] In another particular embodiment of the invention, —X—Y— is —O—CHR^{a}—, W is oxygen and R¹, R², R³, R⁵ and R⁵* are all hydrogen at the same time. Such 6′-substituted LNA nucleosides are disclosed in WO 2010/036698 and WO 2007/090071 which are both hereby incorporated by reference. In such 6′-substituted LNA nucleosides, R^{a} is in particular C1-C alkyl, such as methyl.

[0134] In another particular embodiment of the invention, —X—Y— is —O—CH(CH₂—O—CH₃)— (“2′ 0-methoxyethyl bicyclic nucleic acid”, Seth et al. J. Org. Chem. 2010, Vol 75(5) pp. 1569-81).

[0135] In another particular embodiment of the invention, —X—Y— is —O—CH(CH₂CH₃)— (“2′O-ethyl bicyclic nucleic acid”, Seth at al., J. Org. Chem. 2010, Vol 75(5) pp. 1569-81).

[0136] In another particular embodiment of the invention, —X—Y— is —O—CH(CH₂—O—CH₃)—, W is oxygen and R¹, R², R³, R⁵ and R⁵* are all hydrogen at the same time. Such LNA nucleosides are also known in the art as cyclic MOEs (cMOE) and are disclosed in WO 2007/090071.

[0137] In another particular embodiment of the invention, —X—Y— is —O—CH(CH₃)—.

[0138] In another particular embodiment of the invention, —X—Y— is —O—CH₂—O—CH₂— (Seth et al., J. Org. Chem 2010 op. cit.)

[0139] In another particular embodiment of the invention, —X—Y— is —O—CH(CH₃)—, W is oxygen and R¹, R², R³, R⁵ and R⁵* are all hydrogen at the same time. Such 6′-methyl LNA nucleosides are also known in the art as cET nucleosides, and may be either (S)-cET or (R)-cET diastereoisomers, as disclosed in WO 2007/090071 (beta-D) and WO 2010/036698 (alpha-L) which are both hereby incorporated by reference.

[0140] In another particular embodiment of the invention, —X—Y— is —O—CR^{a}R^{b}—, wherein neither R^{a} nor R^{b} is hydrogen, W is oxygen and R¹, R², R³, R⁵ and R⁵* are all hydrogen at the same time. In a particular embodiment, R^{a} and R^{b} are both alkyl at the same time, in particular both methyl at the same time. Such 6′-di-substituted LNA nucleosides are disclosed in WO 2009/006478 which is hereby incorporated by reference.

[0141] In another particular embodiment of the invention, —X—Y— is —S—CHR^{a}—, W is oxygen and R¹, R², R³, R⁵ and R⁵* are all hydrogen at the same time. Such 6′-substituted thio LNA nucleosides are disclosed in WO 2011/156202 which is hereby incorporated by reference. In a particular embodiment of such 6′-substituted thio LNA, R^{a} is alkyl, in particular methyl.

[0142] In a particular embodiment of the invention, —X—Y— is —C(═CH₂)C(R^{a}R^{b}), —C(═CHF)C(R^{a}R^{b}) or —C(═CF₂)C(R^{a}R^{b}), W is oxygen and R¹, R², R³, R⁵ and R⁵* are all hydrogen at the same time. R^{a} and R^{b} are advantageously independently selected from hydrogen, halogen, alkyl and alkoxyalkyl, in particular hydrogen, methyl, fluoro and methoxymethyl. R^{a} and R^{b} are in particular both hydrogen or methyl at the same time or one of R^{a} and R^{b} is hydrogen and the other one is methyl. Such vinyl carbo LNA nucleosides are disclosed in WO 2008/154401 and WO 2009/067647 which are both hereby incorporated by reference.

[0143] In a particular embodiment of the invention, —X—Y— is —N(OR^{a})—CH₂—, W is oxygen and R¹, R², R³, R⁵ and R⁵* are all hydrogen at the same time. In a particular embodiment, R^{a} is alkyl such as methyl. Such LNA nucleosides are also known as N substituted LNAs and are disclosed in WO 2008/150729 which is hereby incorporated by reference.

[0144] In a particular embodiment of the invention, —X—Y— is —O—N(R^{a}), —N(R^{a})—O—, —NR^{a}—CR^{a}R^{b}—CR^{a}R^{b}— or —NR^{a}—CR^{a}R^{b}—, W is oxygen and R¹, R², R³, R⁵ and R⁵* are all hydrogen at the same time. R^{a} and R^{b} are advantageously independently selected from hydrogen, halogen, alkyl and alkoxyalkyl, in particular hydrogen, methyl, fluoro and methoxymethyl. In a particular embodiment, R^{a} is alkyl, such as methyl, R^{b} is hydrogen or methyl, in particular hydrogen. (Seth et al., J. Org. Chem 2010 op. cit.).

[0145] In a particular embodiment of the invention, —X—Y— is —O—N(CH₃)— (Seth et al., J. Org. Chem 2010 op. cit.).

[0146] In a particular embodiment of the invention, R⁵ and R⁵* are both hydrogen at the same time. In another particular embodiment of the invention, one of R⁵ and R⁵* is hydrogen and the other one is alkyl, such as methyl. In such embodiments, R¹, R² and R³ can be in particular hydrogen and —X—Y— can be in particular —O—CH₂— or —O—CHC(R^{a})₃—, such as —O—CH(CH₃)—.

[0147] In a particular embodiment of the invention, —X—Y— is —CR^{a}R^{b}—O—CR^{a}R^{b}—, such as —CH₂—O—CH₂—, W is oxygen and R¹, R², R³, R⁵ and R⁵* are all hydrogen at the same time. In such particular embodiments, R^{a} can be in particular alkyl such as methyl, R^{b} hydrogen or methyl, in particular hydrogen. Such LNA nucleosides are also known as conformationally restricted nucleotides (CRNs) and are disclosed in WO 2013/036868 which is hereby incorporated by reference.

[0148] In a particular embodiment of the invention, —X—Y— is —O—CR^{a}R^{b}—O—CR^{a}R^{b}—, such as —O—CH₂—O—CH₂—, W is oxygen and R¹, R², R³, R⁵ and R⁵* are all hydrogen at the same time. R^{a} and R^{b} are advantageously independently selected from hydrogen, halogen, alkyl and alkoxyalkyl, in particular hydrogen, methyl, fluoro and methoxymethyl. In such a particular embodiment, R^{a} can be in particular alkyl such as methyl, R^{b} hydrogen or methyl, in particular hydrogen. Such LNA nucleosides are also known as COC nucleotides and are disclosed in Mitsuoka et al., Nucleic Acids Research 2009, 37(4), 1225-1238, which is hereby incorporated by reference.

[0149] It will be recognized that, unless specified, the LNA nucleosides may be in the beta-D or alpha-L stereoisoform.

[0150] Particular examples of LNA nucleosides of the invention are presented in Scheme 1 (wherein B is as defined above).

[chemical structure]

[0151] Particular LNA nucleosides are beta-D-oxy-LNA, 6′-methyl-beta-D-oxy LNA such as (S)-6′-methyl-beta-D-oxy-LNA (ScET) and ENA.

[0152] If one of the starting materials or compounds of the invention contain one or more functional groups which are not stable or are reactive under the reaction conditions of one or more reaction steps, appropriate protecting groups (as described e.g. in “Protective Groups in Organic Chemistry” by T. W. Greene and P. G. M. Wuts, 3rd Ed., 1999, Wiley, New York) can be introduced before the critical step applying methods well known in the art. Such protecting groups can be removed at a later stage of the synthesis using standard methods described in the literature. Examples of protecting groups are tert-butoxycarbonyl (Boc), 9-fluorenylmethyl carbamate (Fmoc), 2-trimethylsilylethyl carbamate (Teoc), carbobenzyloxy (Cbz) and p-methoxybenzyloxycarbonyl (Moz).

[0153] The compounds described herein can contain several asymmetric centers and can be present in the form of optically pure enantiomers, mixtures of enantiomers such as, for example, racemates, mixtures of diastereoisomers, diastereoisomeric racemates or mixtures of diastereoisomeric racemates.

[0154] The term “asymmetric carbon atom” means a carbon atom with four different substituents. According to the Cahn-Ingold-Prelog Convention an asymmetric carbon atom can be of the “R” or “S” configuration.

or

### Chemical Group Definitions

[0155] In the present description the term “alkyl”, alone or in combination, signifies a straight-chain or branched-chain alkyl group with 1 to 8 carbon atoms, particularly a straight or branched-chain alkyl group with 1 to 6 carbon atoms and more particularly a straight or branched-chain alkyl group with 1 to 4 carbon atoms. Examples of straight-chain and branched-chain C₁-C₈ alkyl groups are methyl, ethyl, propyl, isopropyl, butyl, isobutyl, tert.-butyl, the isomeric pentyls, the isomeric hexyls, the isomeric heptyls and the isomeric octyls, particularly methyl, ethyl, propyl, butyl and pentyl. Particular examples of alkyl are methyl, ethyl and propyl.

[0156] The term “cycloalkyl”, alone or in combination, signifies a cycloalkyl ring with 3 to 8 carbon atoms and particularly a cycloalkyl ring with 3 to 6 carbon atoms. Examples of cycloalkyl are cyclopropyl, cyclobutyl, cyclopentyl, cyclohexyl, cycloheptyl and cyclooctyl, more particularly cyclopropyl and cyclobutyl. A particular example of “cycloalkyl” is cyclopropyl.

[0157] The term “alkoxy”, alone or in combination, signifies a group of the formula alkyl-O— in which the term “alkyl” has the previously given significance, such as methoxy, ethoxy, n-propoxy, isopropoxy, n-butoxy, isobutoxy, sec.butoxy and tert.butoxy. Particular “alkoxy” are methoxy and ethoxy. Methoxyethoxy is a particular example of “alkoxyalkoxy”.

[0158] The term “oxy”, alone or in combination, signifies the —O— group.

[0159] The term “alkenyl”, alone or in combination, signifies a straight-chain or branched hydrocarbon residue comprising an olefinic bond and up to 8, preferably up to 6, particularly preferred up to 4 carbon atoms. Examples of alkenyl groups are ethenyl, 1-propenyl, 2-propenyl, isopropenyl, 1-butenyl, 2-butenyl, 3-butenyl and isobutenyl.

[0160] The term “alkynyl”, alone or in combination, signifies a straight-chain or branched hydrocarbon residue comprising a triple bond and up to 8, preferably up to 6, particularly preferred up to 4 carbon atoms.

[0161] The terms “halogen” or “halo”, alone or in combination, signifies fluorine, chlorine, bromine or iodine and particularly fluorine, chlorine or bromine, more particularly fluorine. The term “halo”, in combination with another group, denotes the substitution of said group with at least one halogen, particularly substituted with one to five halogens, particularly one to four halogens, i.e. one, two, three or four halogens.

[0162] The term “haloalkyl”, alone or in combination, denotes an alkyl group substituted with at least one halogen, particularly substituted with one to five halogens, particularly one to three halogens. Examples of haloalkyl include monofluoro-, difluoro- or trifluoro-methyl, -ethyl or -propyl, for example 3,3,3-trifluoropropyl, 2-fluoroethyl, 2,2,2-trifluoroethyl, fluoromethyl or trifluoromethyl. Fluoromethyl, difluoromethyl and trifluoromethyl are particular “haloalkyl”.

[0163] The term “halocycloalkyl”, alone or in combination, denotes a cycloalkyl group as defined above substituted with at least one halogen, particularly substituted with one to five halogens, particularly one to three halogens. Particular example of “halocycloalkyl” are halocyclopropyl, in particular fluorocyclopropyl, difluorocyclopropyl and trifluorocyclopropyl.

[0164] The terms “hydroxyl” and “hydroxy”, alone or in combination, signify the —OH group.

[0165] The terms “thiohydroxyl” and “thiohydroxy”, alone or in combination, signify the —SH group.

[0166] The term “carbonyl”, alone or in combination, signifies the —C(O)— group.

[0167] The term “carboxy” or “carboxyl”, alone or in combination, signifies the —COOH group.

[0168] The term “amino”, alone or in combination, signifies the primary amino group (—NH₂), the secondary amino group (—NH—), or the tertiary amino group (—N—).

[0169] The term “alkylamino”, alone or in combination, signifies an amino group as defined above substituted with one or two alkyl groups as defined above.

[0170] The term “sulfonyl”, alone or in combination, means the —SO₂ group.

[0171] The term “sulfinyl”, alone or in combination, signifies the —SO— group.

[0172] The term “sulfanyl”, alone or in combination, signifies the —S— group.

[0173] The term “cyano”, alone or in combination, signifies the —CN group.

[0174] The term “azido”, alone or in combination, signifies the —N₃ group.

[0175] The term “nitro”, alone or in combination, signifies the NO₂ group.

[0176] The term “formyl”, alone or in combination, signifies the —C(O)H group.

[0177] The term “carbamoyl”, alone or in combination, signifies the —C(O)NH₂ group.

[0178] The term “cabamido”, alone or in combination, signifies the —NH—C(O)—NH₂ group.

[0179] The term “aryl”, alone or in combination, denotes a monovalent aromatic carbocyclic mono- or bicyclic ring system comprising 6 to 10 carbon ring atoms, optionally substituted with 1 to 3 substituents independently selected from halogen, hydroxyl, alkyl, alkenyl, alkynyl, alkoxy, alkoxyalkyl, alkenyloxy, carboxyl, alkoxycarbonyl, alkylcarbonyl and formyl. Examples of aryl include phenyl and naphthyl, in particular phenyl.

[0180] The term “heteroaryl”, alone or in combination, denotes a monovalent aromatic heterocyclic mono- or bicyclic ring system of 5 to 12 ring atoms, comprising 1, 2, 3 or 4 heteroatoms selected from N, O and S, the remaining ring atoms being carbon, optionally substituted with 1 to 3 substituents independently selected from halogen, hydroxyl, alkyl, alkenyl, alkynyl, alkoxy, alkoxyalkyl, alkenyloxy, carboxyl, alkoxycarbonyl, alkylcarbonyl and formyl. Examples of heteroaryl include pyrrolyl, furanyl, thienyl, imidazolyl, oxazolyl, thiazolyl, triazolyl, oxadiazolyl, thiadiazolyl, tetrazolyl, pyridinyl, pyrazinyl, pyrazolyl, pyridazinyl, pyrimidinyl, triazinyl, azepinyl, diazepinyl, isoxazolyl, benzofuranyl, isothiazolyl, benzothienyl, indolyl, isoindolyl, isobenzofuranyl, benzimidazolyl, benzoxazolyl, benzoisoxazolyl, benzothiazolyl, benzoisothiazolyl, benzooxadiazolyl, benzothiadiazolyl, benzotriazolyl, purinyl, quinolinyl, isoquinolinyl, quinazolinyl, quinoxalinyl, carbazolyl or acridinyl.

[0181] The term “heterocyclyl”, alone or in combination, signifies a monovalent saturated or partly unsaturated mono- or bicyclic ring system of 4 to 12, in particular 4 to 9 ring atoms, comprising 1, 2, 3 or 4 ring heteroatoms selected from N, O and S, the remaining ring atoms being carbon, optionally substituted with 1 to 3 substituents independently selected from halogen, hydroxyl, alkyl, alkenyl, alkynyl, alkoxy, alkoxyalkyl, alkenyloxy, carboxyl, alkoxycarbonyl, alkylcarbonyl and formyl. Examples for monocyclic saturated heterocyclyl are azetidinyl, pyrrolidinyl, tetrahydrofuranyl, tetrahydro-thienyl, pyrazolidinyl, imidazolidinyl, oxazolidinyl, isoxazolidinyl, thiazolidinyl, piperidinyl, tetrahydropyranyl, tetrahydrothiopyranyl, piperazinyl, morpholinyl, thiomorpholinyl, 1,1-dioxo-thiomorpholin-4-yl, azepanyl, diazepanyl, homopiperazinyl, or oxazepanyl. Examples for bicyclic saturated heterocycloalkyl are 8-aza-bicyclo[3.2.1]octyl, quinuclidinyl, 8-oxa-3-aza-bicyclo[3.2.1]octyl, 9-aza-bicyclo[3.3.1]nonyl, 3-oxa-9-aza-bicyclo[3.3.1]nonyl, or 3-thia-9-aza-bicyclo[3.3.1]nonyl. Examples for partly unsaturated heterocycloalkyl are dihydrofuryl, imidazolinyl, dihydro-oxazolyl, tetrahydro-pyridinyl or dihydropyranyl.

### Pharmaceutically Acceptable Salts

[0182] The term “pharmaceutically acceptable salts” refers to those salts which retain the biological effectiveness and properties of the free bases or free acids, which are not biologically or otherwise undesirable. The salts are formed with inorganic acids such as hydrochloric acid, hydrobromic acid, sulfuric acid, nitric acid, phosphoric acid, particularly hydrochloric acid, and organic acids such as acetic acid, propionic acid, glycolic acid, pyruvic acid, oxalic acid, maleic acid, malonic acid, succinic acid, fumaric acid, tartaric acid, citric acid, benzoic acid, cinnamic acid, mandelic acid, methanesulfonic acid, ethanesulfonic acid, p-toluenesulfonic acid, salicylic acid, N-acetylcystein. In addition these salts may be prepared form addition of an inorganic base or an organic base to the free acid. Salts derived from an inorganic base include, but are not limited to, the sodium, potassium, lithium, ammonium, calcium, magnesium salts. Salts derived from organic bases include, but are not limited to salts of primary, secondary, and tertiary amines, substituted amines including naturally occurring substituted amines, cyclic amines and basic ion exchange resins, such as isopropylamine, trimethylamine, diethylamine, triethylamine, tripropylamine, ethanolamine, lysine, arginine, N-ethylpiperidine, piperidine, polyamine resins. The compound of formula (1) can also be present in the form of zwitterions. Particularly preferred pharmaceutically acceptable salts of compounds of formula (1) are the salts of hydrochloric acid, hydrobromic acid, sulfuric acid, phosphoric acid and methanesulfonic acid.

### Protecting Group

[0183] The term “protecting group”, alone or in combination, signifies a group which selectively blocks a reactive site in a multifunctional compound such that a chemical reaction can be carried out selectively at another unprotected reactive site. Protecting groups can be removed. Exemplary protecting groups are amino-protecting groups, carboxy-protecting groups or hydroxy-protecting groups.

### Nuclease Mediated Degradation

[0184] Nuclease mediated degradation refers to an oligonucleotide capable of mediating degradation of a complementary nucleotide sequence when forming a duplex with such a sequence.

[0185] In some embodiments, the oligonucleotide may function via nuclease mediated degradation of the target nucleic acid, where the oligonucleotides of the invention are capable of recruiting a nuclease, particularly and endonuclease, preferably endoribonuclease (RNase), such as RNase H. Examples of oligonucleotide designs which operate via nuclease mediated mechanisms are oligonucleotides which typically comprise a region of at least 5 or 6 DNA nucleosides and are flanked on one side or both sides by affinity enhancing nucleosides, for example gapmers, headmers and tailmers.

### RNase H Activity and Recruitment

[0186] The RNase H activity of an antisense oligonucleotide refers to its ability to recruit RNase H when in a duplex with a complementary RNA molecule. WO01/23613 provides in vitro methods for determining RNaseH activity, which may be used to determine the ability to recruit RNaseH. Typically an oligonucleotide is deemed capable of recruiting RNase H if it, when provided with a complementary target nucleic acid sequence, has an initial rate, as measured in pmol/l/min, of at least 5%, such as at least 10% or more than 20% of the of the initial rate determined when using a oligonucleotide having the same base sequence as the modified oligonucleotide being tested, but containing only DNA monomers with phosphorothioate linkages between all monomers in the oligonucleotide, and using the methodology provided by Example 91-95 of WO01/23613 (hereby incorporated by reference). For use in determining RHase H activity, recombinant human RNase H1 is available from Lubio Science GmbH, Lucerne, Switzerland.

### Gapmer

[0187] The antisense oligonucleotide of the invention, or contiguous nucleotide sequence thereof may be a gapmer. The antisense gapmers are commonly used to inhibit a target nucleic acid via RNase H mediated degradation. A gapmer oligonucleotide comprises at least three distinct structural regions a 5′-flank, a gap and a 3′-flank, F-G-F′ in the ‘5->3’ orientation. The “gap” region (G) comprises a stretch of contiguous DNA nucleotides which enable the oligonucleotide to recruit RNase H. The gap region is flanked by a 5′ flanking region (F) comprising one or more sugar modified nucleosides, advantageously high affinity sugar modified nucleosides, and by a 3′ flanking region (F′) comprising one or more sugar modified nucleosides, advantageously high affinity sugar modified nucleosides. The one or more sugar modified nucleosides in region F and F′ enhance the affinity of the oligonucleotide for the target nucleic acid (i.e. are affinity enhancing sugar modified nucleosides). In some embodiments, the one or more sugar modified nucleosides in region F and F′ are 2′ sugar modified nucleosides, such as high affinity 2′ sugar modifications, such as independently selected from LNA and 2′-MOE.

[0188] In a gapmer design, the 5′ and 3′ most nucleosides of the gap region are DNA nucleosides, and are positioned adjacent to a sugar modified nucleoside of the 5′ (F) or 3′ (F′) region respectively. The flanks may further defined by having at least one sugar modified nucleoside at the end most distant from the gap region, i.e. at the 5′ end of the 5′ flank and at the 3′ end of the 3′ flank.

[0189] Regions F-G-F′ form a contiguous nucleotide sequence. Antisense oligonucleotides of the invention, or the contiguous nucleotide sequence thereof, may comprise a gapmer region of formula F-G-F′.

[0190] The overall length of the gapmer design F-G-F′ may be, for example 12 to 32 nucleosides, such as 13 to 24, such as 14 to 22 nucleosides, Such as from 14 to 17, such as 16 to 18 nucleosides.

[0191] By way of example, the gapmer oligonucleotide of the present invention can be represented by the following formulae:

F₁₋₈-G₅₋₁₆-F′₁₋₈,such as

F₁₋₈-G₇₋₁₆-F′₂₋₈

with the proviso that the overall length of the gapmer regions F-G-F′ is at least 12, such as at least 14 nucleotides in length.

[0192] Regions F, G and F′ are further defined below and can be incorporated into the F-G-F′ formula.

### Gapmer—Region G

[0193] Region G (gap region) of the gapmer is a region of nucleosides which enables the oligonucleotide to recruit RNaseH, such as human RNase H1, typically DNA nucleosides. RNaseH is a cellular enzyme which recognizes the duplex between DNA and RNA, and enzymatically cleaves the RNA molecule. Suitably gapmers may have a gap region (G) of at least 5 or 6 contiguous DNA nucleosides, such as 5-16 contiguous DNA nucleosides, such as 6-15 contiguous DNA nucleosides, such as 7-14 contiguous DNA nucleosides, such as 8-12 contiguous DNA nucleotides, such as 8-12 contiguous DNA nucleotides in length. The gap region G may, in some embodiments consist of 6, 7, 8, 9, 10, 11, 12, 13, 14, 15 or 16 contiguous DNA nucleosides. Cytosine (C) DNA in the gap region may in some instances be methylated, such residues are either annotated as 5-methyl-cytosine (^{me}C or with an e instead of a c). Methylation of Cytosine DNA in the gap is advantageous if cg dinucleotides are present in the gap to reduce potential toxicity, the modification does not have significant impact on efficacy of the oligonucleotides.

[0194] In some embodiments the gap region G may consist of 6, 7, 8, 9, 10, 11, 12, 13, 14, 15 or 16 contiguous phosphorothioate linked DNA nucleosides. In some embodiments, all internucleoside linkages in the gap are phosphorothioate linkages.

[0195] Whilst traditional gapmers have a DNA gap region, there are numerous examples of modified nucleosides which allow for RNaseH recruitment when they are used within the gap region. Modified nucleosides which have been reported as being capable of recruiting RNaseH when included within a gap region include, for example, alpha-L-LNA, C4′ alkylated DNA (as described in PCT/EP2009/050349 and Vester et al., Bioorg. Med. Chem. Lett. 18 (2008) 2296-2300, both incorporated herein by reference), arabinose derived nucleosides like ANA and 2′F-ANA (Mangos et al. 2003 J. AM. CHEM. SOC. 125, 654-661), UNA (unlocked nucleic acid) (as described in Fluiter et al., Mol. Biosyst., 2009, 10, 1039 incorporated herein by reference). UNA is unlocked nucleic acid, typically where the bond between C2 and C3 of the ribose has been removed, forming an unlocked “sugar” residue. The modified nucleosides used in such gapmers may be nucleosides which adopt a 2′ endo (DNA like) structure when introduced into the gap region, i.e. modifications which allow for RNaseH recruitment). In some embodiments the DNA Gap region (G) described herein may optionally contain 1 to 3 sugar modified nucleosides which adopt a 2′ endo (DNA like) structure when introduced into the gap region.

### Region G—“Gap-Breaker”

[0196] Alternatively, there are numerous reports of the insertion of a modified nucleoside which confers a 3′ endo conformation into the gap region of gapmers, whilst retaining some RNaseH activity. Such gapmers with a gap region comprising one or more 3′endo modified nucleosides are referred to as “gap-breaker” or “gap-disrupted” gapmers, see for example WO2013/022984. Gap-breaker oligonucleotides retain sufficient region of DNA nucleosides within the gap region to allow for RNaseH recruitment. The ability of gapbreaker oligonucleotide design to recruit RNaseH is typically sequence or even compound specific—see Rukov et al. 2015 Nucl. Acids Res. Vol. 43 pp. 8476-8487, which discloses “gapbreaker” oligonucleotides which recruit RNaseH which in some instances provide a more specific cleavage of the target RNA. Modified nucleosides used within the gap region of gap-breaker oligonucleotides may for example be modified nucleosides which confer a 3′endo confirmation, such 2′-O-methyl (OMe) or 2′-O-MOE (MOE) nucleosides, or beta-D LNA nucleosides (the bridge between C2′ and C4′ of the ribose sugar ring of a nucleoside is in the beta conformation), such as beta-D-oxy LNA or ScET nucleosides.

[0197] As with gapmers containing region G described above, the gap region of gap-breaker or gap-disrupted gapmers, have a DNA nucleosides at the 5′ end of the gap (adjacent to the 3′ nucleoside of region F), and a DNA nucleoside at the 3′ end of the gap (adjacent to the 5′ nucleoside of region F′). Gapmers which comprise a disrupted gap typically retain a region of at least 3 or 4 contiguous DNA nucleosides at either the 5′ end or 3′ end of the gap region.

[0198] Exemplary designs for gap-breaker oligonucleotides include

F₁₋₈-[D₃₋₄-E₁-D₃₋₄]—F′₁₋₈

F₁₋₈-[D₁₋₄-E₁-D₃₋₄]—F′₁₋₈

F₁₋₈-[D₃₋₄-E₁-D₁₋₄]—F′₁₋₈

wherein region G is within the brackets [Dₙ-Eᵣ-Dₙ], D is a contiguous sequence of DNA nucleosides, E is a modified nucleoside (the gap-breaker or gap-disrupting nucleoside), and F and F′ are the flanking regions as defined herein, and with the proviso that the overall length of the gapmer regions F-G-F′ is at least 12, such as at least 14 nucleotides in length.

[0199] In some embodiments, region G of a gap disrupted gapmer comprises at least 6 DNA nucleosides, such as 6, 7, 8, 9, 10, 11, 12, 13, 14, 15 or 16 DNA nucleosides. As described above, the DNA nucleosides may be contiguous or may optionally be interspersed with one or more modified nucleosides, with the proviso that the gap region G is capable of mediating RNaseH recruitment.

### Gapmer—Flanking Regions, F and F′

[0200] Region F is positioned immediately adjacent to the 5′ DNA nucleoside of region G. The 3′ most nucleoside of region F is a sugar modified nucleoside, such as a high affinity sugar modified nucleoside, for example a 2′ substituted nucleoside, such as a MOE nucleoside, or an LNA nucleoside.

[0201] Region F′ is positioned immediately adjacent to the 3′ DNA nucleoside of region G. The 5′ most nucleoside of region F′ is a sugar modified nucleoside, such as a high affinity sugar modified nucleoside, for example a 2′ substituted nucleoside, such as a MOE nucleoside, or an LNA nucleoside.

[0202] Region F is 1-8 contiguous nucleotides in length, such as 2-6, such as 3-4 contiguous nucleotides in length. Advantageously the 5′ most nucleoside of region F is a sugar modified nucleoside. In some embodiments the two 5′ most nucleoside of region F are sugar modified nucleoside. In some embodiments the 5′ most nucleoside of region F is an LNA nucleoside. In some embodiments the two 5′ most nucleoside of region F are LNA nucleosides. In some embodiments the two 5′ most nucleoside of region F are 2′ substituted nucleoside nucleosides, such as two 3′ MOE nucleosides. In some embodiments the 5′ most nucleoside of region F is a 2′ substituted nucleoside, such as a MOE nucleoside.

[0203] Region F′ is 2-8 contiguous nucleotides in length, such as 3-6, such as 4-5 contiguous nucleotides in length. Advantageously, embodiments the 3′ most nucleoside of region F′ is a sugar modified nucleoside. In some embodiments the two 3′ most nucleoside of region F′ are sugar modified nucleoside. In some embodiments the two 3′ most nucleoside of region F′ are LNA nucleosides. In some embodiments the 3′ most nucleoside of region F′ is an LNA nucleoside. In some embodiments the two 3′ most nucleoside of region F′ are 2′ substituted nucleoside nucleosides, such as two 3′ MOE nucleosides. In some embodiments the 3′ most nucleoside of region F′ is a 2′ substituted nucleoside, such as a MOE nucleoside.

[0204] It should be noted that when the length of region F or F′ is one, it is advantageously an LNA nucleoside.

[0205] In some embodiments, region F and F′ independently consists of or comprises a contiguous sequence of sugar modified nucleosides. In some embodiments, the sugar modified nucleosides of region F may be independently selected from 2′-O-alkyl-RNA units, 2′-O-methyl-RNA, 2′-amino-DNA units, 2′-fluoro-DNA units, 2′-alkoxy-RNA, MOE units, LNA units, arabino nucleic acid (ANA) units and 2′-fluoro-ANA units.

[0206] In some embodiments, region F and F′ independently comprises both LNA and a 2′ substituted modified nucleosides (mixed wing design).

[0207] In some embodiments, region F and F′ consists of only one type of sugar modified nucleosides, such as only MOE or only beta-D-oxy LNA or only ScET. Such designs are also termed uniform flanks or uniform gapmer design.

[0208] In some embodiments, all the nucleosides of region F or F′, or F and F′ are LNA nucleosides, such as independently selected from beta-D-oxy LNA, ENA or ScET nucleosides. In some embodiments region F consists of 1-5, such as 2-4, such as 3-4 such as 1, 2, 3, 4 or 5 contiguous LNA nucleosides. In some embodiments, all the nucleosides of region F and F′ are beta-D-oxy LNA nucleosides.

[0209] In some embodiments, all the nucleosides of region F or F′, or F and F′ are 2′ substituted nucleosides, such as OMe or MOE nucleosides. In some embodiments region F consists of 1, 2, 3, 4, 5, 6, 7, or 8 contiguous OMe or MOE nucleosides. In some embodiments only one of the flanking regions can consist of 2′ substituted nucleosides, such as OMe or MOE nucleosides. In some embodiments it is the 5′ (F) flanking region that consists 2′ substituted nucleosides, such as OMe or MOE nucleosides whereas the 3′ (F′) flanking region comprises at least one LNA nucleoside, such as beta-D-oxy LNA nucleosides or cET nucleosides. In some embodiments it is the 3′ (F′) flanking region that consists 2′ substituted nucleosides, such as OMe or MOE nucleosides whereas the 5′ (F) flanking region comprises at least one LNA nucleoside, such as beta-D-oxy LNA nucleosides or cET nucleosides.

[0210] In some embodiments, all the modified nucleosides of region F and F′ are LNA nucleosides, such as independently selected from beta-D-oxy LNA, ENA or ScET nucleosides, wherein region F or F′, or F and F′ may optionally comprise DNA nucleosides (an alternating flank, see definition of these for more details). In some embodiments, all the modified nucleosides of region F and F′ are beta-D-oxy LNA nucleosides, wherein region F or F′, or F and F′ may optionally comprise DNA nucleosides (an alternating flank, see definition of these for more details).

[0211] In some embodiments the 5′ most and the 3′ most nucleosides of region F and F′ are LNA nucleosides, such as beta-D-oxy LNA nucleosides or ScET nucleosides.

[0212] In some embodiments, the internucleoside linkage between region F and region G is a phosphorothioate internucleoside linkage. In some embodiments, the internucleoside linkage between region F′ and region G is a phosphorothioate internucleoside linkage. In some embodiments, the internucleoside linkages between the nucleosides of region F or F′, F and F′ are phosphorothioate internucleoside linkages.

[0213] Further gapmer designs are disclosed in WO 2004/046160, WO 2007/146511 and WO 2008/113832, hereby incorporated by reference.

### LNA Gapmer

[0214] An LNA gapmer is a gapmer wherein either one or both of region F and F′ comprises or consists of LNA nucleosides. A beta-D-oxy gapmer is a gapmer wherein either one or both of region F and F′ comprises or consists of beta-D-oxy LNA nucleosides.

[0215] In some embodiments the LNA gapmer is of formula: [LNA]_{1_5}-[region G]-[LNA]₁₋₅, wherein region G is as defined in the Gapmer region G definition.

### MOE Gapmers

[0216] A MOE gapmers is a gapmer wherein regions F and F′ consist of MOE nucleosides. In some embodiments the MOE gapmer is of design [MOE]₁₋₈-[Region G]-[MOE]₁₋₈, such as [MOE]₂₋₇-[Region G]₅₋₁₆-[MOE]₂₋₇, such as [MOE]₃₋₆-[Region G]-[MOE]₃₋₆, wherein region G is as defined in the Gapmer definition. MOE gapmers with a 5-10-5 design (MOE-DNA-MOE) have been widely used in the art.

### Mixed Wing Gapmer

[0217] A mixed wing gapmer is an LNA gapmer wherein one or both of region F and F′ comprise a 2′ substituted nucleoside, such as a 2′ substituted nucleoside independently selected from the group consisting of 2′-O-alkyl-RNA units, 2′-O-methyl-RNA, 2′-amino-DNA units, 2′-fluoro-DNA units, 2′-alkoxy-RNA, MOE units, arabino nucleic acid (ANA) units and 2′-fluoro-ANA units, such as a MOE nucleosides. In some embodiments wherein at least one of region F and F′, or both region F and F′ comprise at least one LNA nucleoside, the remaining nucleosides of region F and F′ are independently selected from the group consisting of MOE and LNA. In some embodiments wherein at least one of region F and F′, or both region F and F′ comprise at least two LNA nucleosides, the remaining nucleosides of region F and F′ are independently selected from the group consisting of MOE and LNA. In some mixed wing embodiments, one or both of region F and F′ may further comprise one or more DNA nucleosides.

[0218] Mixed wing gapmer designs are disclosed in WO 2008/049085 and WO 2012/109395, both of which are hereby incorporated by reference.

### Alternating Flank Gapmers

[0219] Flanking regions may comprise both LNA and DNA nucleoside and are referred to as “alternating flanks” as they comprise an alternating motif of LNA-DNA-LNA nucleosides. Gapmers comprising such alternating flanks are referred to as “alternating flank gapmers”. “Alternative flank gapmers” are thus LNA gapmer oligonucleotides where at least one of the flanks (F or F′) comprises DNA in addition to the LNA nucleoside(s). In some embodiments at least one of region F or F′, or both region F and F′, comprise both LNA nucleosides and DNA nucleosides. In such embodiments, the flanking region F or F′, or both F and F′ comprise at least three nucleosides, wherein the 5′ and 3′ most nucleosides of the F and/or F′ region are LNA nucleosides.

[0220] Alternating flank LNA gapmers are disclosed in WO 2016/127002.

[0221] Oligonucleotides with alternating flanks are LNA gapmer oligonucleotides where at least one of the flanks (F or F′) comprises DNA in addition to the LNA nucleoside(s). In some embodiments at least one of region F or F′, or both region F and F′, comprise both LNA nucleosides and DNA nucleosides. In such embodiments, the flanking region F or F′, or both F and F′ comprise at least three nucleosides, wherein the 5′ and 3′ most nucleosides of the F and/or F′ region are LNA nucleosides.

[0222] In some embodiments at least one of region F or F′, or both region F and F′, comprise both LNA nucleosides and DNA nucleosides. In such embodiments, the flanking region F or F′, or both F and F′ comprise at least three nucleosides, wherein the 5′ and 3′ most nucleosides of the F or F′ region are LNA nucleosides, and the. Flanking regions which comprise both LNA and DNA nucleoside are referred to as alternating flanks, as they comprise an alternating motif of LNA-DNA-LNA nucleosides. Alternating flank LNA gapmers are disclosed in WO2016/127002.

[0223] An alternating flank region may comprise up to 3 contiguous DNA nucleosides, such as 1 to 2 or 1 or 2 or 3 contiguous DNA nucleosides.

[0224] The alternating flak can be annotated as a series of integers, representing a number of LNA nucleosides (L) followed by a number of DNA nucleosides (D), for example

[L]₁₋₃-[D]₁₋₄-[L]₁₋₃

[L]₁₋₂-[D]₁₋₂-[L]₁₋₂-[D]₁₋₂-[L]₁₋₂

[0225] In oligonucleotide designs these will often be represented as numbers such that 2-2-1 represents 5′ [L]₂-[D]₂-[L] 3′, and 1-1-1-1-1 represents 5′ [L]-[D]-[L]-[D]-[L] 3′. The length of the flank (region F and F′) in oligonucleotides with alternating flanks may independently be 3 to 10 nucleosides, such as 4 to 8, such as 5 to 6 nucleosides, such as 4, 5, 6 or 7 modified nucleosides. In some embodiments only one of the flanks in the gapmer oligonucleotide is alternating while the other is constituted of LNA nucleotides. It may be advantageous to have at least two LNA nucleosides at the 3′ end of the 3′ flank (F′), to confer additional exonuclease resistance. Some examples of oligonucleotides with alternating flanks are:

[L]₁₋₅-[D]₁₋₄-[L]₁₋₃-[G]₅₋₁₆-[L]₂₋₆

[L]₁₋₂-[D]₁₋₂-[L]₁₋₂-[D]₁₋₂-[L]₁₋₂-[G]₅₋₁₆-[L]₁₋₂-[D]₁₋₃-[L]₂₋₄

[L]₁₋₅-[G]₅₋₁₆-[L]-[D]-[L]-[D]-[L]₂

with the proviso that the overall length of the gapmer is at least 12, such as at least 14 nucleotides in length.

### Region D′ or D″ in an Oligonucleotide

[0226] The oligonucleotide of the invention may in some embodiments comprise or consist of the contiguous nucleotide sequence of the oligonucleotide which is complementary to the target nucleic acid, such as the gapmer F-G-F′, and further 5′ and/or 3′ nucleosides. The further 5′ and/or 3′ nucleosides may or may not be fully complementary to the target nucleic acid. Such further 5′ and/or 3′ nucleosides may be referred to as region D′ and D″ herein.

[0227] The addition of region D′ or D″ may be used for the purpose of joining the contiguous nucleotide sequence, such as the gapmer, to a conjugate moiety or another functional group. When used for joining the contiguous nucleotide sequence with a conjugate moiety is can serve as a biocleavable linker. Alternatively it may be used to provide exonucleoase protection or for ease of synthesis or manufacture.

[0228] Region D′ and D″ can be attached to the 5′ end of region F or the 3′ end of region F′, respectively to generate designs of the following formulas D′—F-G-F′, F-G-F′-D″ or

[0229] D′—F-G-F′-D″. In this instance the F-G-F′ is the gapmer portion of the oligonucleotide and region D′ or D″ constitute a separate part of the oligonucleotide.

[0230] Region D′ or D″ may independently comprise or consist of 1, 2, 3, 4 or 5 additional nucleotides, which may be complementary or non-complementary to the target nucleic acid. The nucleotide adjacent to the F or F′ region is not a sugar-modified nucleotide, such as a DNA or RNA or base modified versions of these. The D′ or D′ region may serve as a nuclease susceptible biocleavable linker (see definition of linkers). In some embodiments the additional 5′ and/or 3′ end nucleotides are linked with phosphodiester linkages, and are DNA or RNA. Nucleotide based biocleavable linkers suitable for use as region D′ or D″ are disclosed in WO 2014/076195, which include by way of example a phosphodiester linked DNA dinucleotide. The use of biocleavable linkers in poly-oligonucleotide constructs is disclosed in WO 2015/113922, where they are used to link multiple antisense constructs (e.g. gapmer regions) within a single oligonucleotide.

[0231] In one embodiment the oligonucleotide of the invention comprises a region D′ and/or D″ in addition to the contiguous nucleotide sequence which constitutes the gapmer.

[0232] In some embodiments, the oligonucleotide of the present invention can be represented by the following formulae:

F-G-F′; in particular F₁₋₈-G₅₋₁₆-F′₂₋₈

D′—F-G-F′, in particular D′₁₋₃-F₁₋₈-G₅₋₁₆-F′₂₋₈

F-G-F′-D″, in particular F₁₋₈-G₅₋₁₆-F′₂₋₈-D″₁₋₃

D′—F-G-F′-D″, in particular D′₁₋₃-F₁₋₈-G₅₋₁₆-F′₂₋₈-D″₁₋₃

[0233] In some embodiments the internucleoside linkage positioned between region D′ and region F is a phosphodiester linkage. In some embodiments the internucleoside linkage positioned between region F′ and region D″ is a phosphodiester linkage.

### Conjugate

[0234] The term conjugate as used herein refers to an oligonucleotide which is covalently linked to a non-nucleotide moiety (conjugate moiety or region C or third region).

[0235] Conjugation of the oligonucleotide of the invention to one or more non-nucleotide moieties may improve the pharmacology of the oligonucleotide, e.g. by affecting the activity, cellular distribution, cellular uptake or stability of the oligonucleotide. In some embodiments the conjugate moiety modify or enhance the pharmacokinetic properties of the oligonucleotide by improving cellular distribution, bioavailability, metabolism, excretion, permeability, and/or cellular uptake of the oligonucleotide. In particular the conjugate may target the oligonucleotide to a specific organ, tissue or cell type and thereby enhance the effectiveness of the oligonucleotide in that organ, tissue or cell type. A the same time the conjugate may serve to reduce activity of the oligonucleotide in non-target cell types, tissues or organs, e.g. off target activity or activity in non-target cell types, tissues or organs. WO 93/07883 and WO2013/033230 provides suitable conjugate moieties, which are hereby incorporated by reference. Further suitable conjugate moieties are those capable of binding to the asialoglycoprotein receptor (ASGPr). In particular tri-valent N-acetylgalactosamine conjugate moieties are suitable for binding to the ASGPr, see for example WO 2014/076196, WO 2014/207232 and WO 2014/179620 (hereby incorporated by reference, in particular, FIG. 13 of WO2014/076196 or claims 158-164 of WO2014/179620).

[0236] Oligonucleotide conjugates and their synthesis has also been reported in comprehensive reviews by Manoharan in Antisense Drug Technology, Principles, Strategies, and Applications, S. T. Crooke, ed., Ch. 16, Marcel Dekker, Inc., 2001 and Manoharan, Antisense and Nucleic Acid Drug Development, 2002, 12, 103, each of which is incorporated herein by reference in its entirety.

[0237] In an embodiment, the non-nucleotide moiety (conjugate moiety) is selected from the group consisting of carbohydrates, cell surface receptor ligands, drug substances, hormones, lipophilic substances, polymers, proteins, peptides, toxins (e.g. bacterial toxins), vitamins, viral proteins (e.g. capsids) or combinations thereof.

### Linkers

[0238] A linkage or linker is a connection between two atoms that links one chemical group or segment of interest to another chemical group or segment of interest via one or more covalent bonds. Conjugate moieties can be attached to the oligonucleotide directly or through a linking moiety (e.g. linker or tether). Linkers serve to covalently connect a third region (region C), e.g. a conjugate moiety to to a first region, e.g. an oligonucleotide or contiguous nucleotide sequence complementary to the target nucleic acid (region A), thereby connecting one of the termini of region A to C.

[0239] In some embodiments of the invention the conjugate or oligonucleotide conjugate of the invention may optionally, comprise a linker region (second region or region B and/or region Y) which is positioned between the oligonucleotide or contiguous nucleotide sequence complementary to the target nucleic acid (region A or first region) and the conjugate moiety (region C or third region).

[0240] Region B refers to biocleavable linkers comprising or consisting of a physiologically labile bond that is cleavable under conditions normally encountered or analogous to those encountered within a mammalian body. Conditions under which physiologically labile linkers undergo chemical transformation (e.g., cleavage) include chemical conditions such as pH, temperature, oxidative or reductive conditions or agents, and salt concentration found in or analogous to those encountered in mammalian cells. Mammalian intracellular conditions also include the presence of enzymatic activity normally present in a mammalian cell such as from proteolytic enzymes or hydrolytic enzymes or nucleases. In one embodiment the biocleavable linker is susceptible to S1 nuclease cleavage. In a preferred embodiment the nuclease susceptible linker comprises between 1 and 10 nucleosides, such as 1, 2, 3, 4, 5, 6, 7, 8, 9 or 10 nucleosides, more preferably between 2 and 6 nucleosides and most preferably between 2 and 4 linked nucleosides comprising at least two consecutive phosphodiester linkages, such as at least 3 or 4 or 5 consecutive phosphodiester linkages. Preferably the nucleosides are DNA or RNA. Phosphodiester containing biocleavable linkers are described in more detail in WO 2014/076195 (hereby incorporated by reference).

[0241] Conjugates may also be linked to the oligonucleotide via non-biocleavable linkers, or in some embodiments the conjugate may comprise a non-cleavable linker which is covalently attached to the biocleavable linker (region Y). Linkers that are not necessarily biocleavable but primarily serve to covalently connect a conjugate moiety (region C or third region), to an oligonucleotide (region A or first region), may comprise a chain structure or an oligomer of repeating units such as ethylene glycol, amino acid units or amino alkyl groups The oligonucleotide conjugates of the present invention can be constructed of the following regional elements A-C, A-B—C, A-B—Y—C, A-Y—B—C or A-Y—C. In some embodiments the non-cleavable linker (region Y) is an amino alkyl, such as a C2-C36 amino alkyl group, including, for example C6 to C12 amino alkyl groups. In a preferred embodiment the linker (region Y) is a C6 amino alkyl group. Conjugate linker groups may be routinely attached to an oligonucleotide via use of an amino modified oligonucleotide, and an activated ester group on the conjugate group.

### Treatment

[0242] The term ‘treatment’ as used herein refers to both treatment of an existing disease (e.g. a disease or disorder as herein referred to), or prevention of a disease, i.e. prophylaxis. It will therefore be recognized that treatment as referred to herein may, in some embodiments, be prophylactic.

### DETAILED DESCRIPTION OF THE INVENTION

### The Oligonucleotides of the Invention

[0243] The invention relates to oligonucleotides capable of downregulating the expression of GSK3B. The modulation is achieved by hybridizing to a target nucleic acid encoding GSK3B or which is involved in the regulation of GSK3B. The target nucleic acid may be a part of mammalian GSK3B sequence selected from the group consisting of SEQ ID NO: 1, 2, 3 and 4 or naturally occurring variants thereof.

[0244] The oligonucleotide of the invention is an antisense oligonucleotide, which targets GSK3B. In some embodiments the antisense oligonucleotide of the invention is capable of modulating the expression of the target by inhibiting or reducing target expression. Preferably, an inhibition of expression of at least 20% compared to the normal expression level of the target, more preferably at least 30%, 40%, 50%, 60%, 70%, 80%, or 90% or 95% inhibition compared to the normal expression level of the target. In some embodiments oligonucleotides of the invention may be capable of inhibiting expression levels of GSK3B mRNA by at least 60% or 70% in vitro using HeLa cells. In some embodiments compounds of the invention may be capable of inhibiting expression levels of GSK3B protein by at least 50% in vitro using HeLa cells. Suitably, the examples provide assays which may be used to measure GSK3B RNA or protein inhibition (e.g. example 1). The target modulation is triggered by the hybridization between a contiguous nucleotide sequence of the oligonucleotide and the target nucleic acid. In some embodiments the oligonucleotide of the invention comprises mismatches between the oligonucleotide and the target nucleic acid. Despite mismatches hybridization to the target nucleic acid may still be sufficient to show a desired modulation of GSK3B expression. Reduced binding affinity resulting from mismatches may advantageously be compensated by increased number of nucleotides in the oligonucleotide and/or an increased number of modified nucleosides capable of increasing the binding affinity to the target, such as 2′ sugar modified nucleosides, including LNA, present within the oligonucleotide sequence.

[0245] An aspect of the present invention relates to a antisense oligonucleotide of 10 to 50, such as 10-30, nucleotides in length, which comprises a contiguous nucleotide sequence of 10 to 30 nucleotides in length with at least 90% complementarity, such as full complementarity, to a mammalian GSK3B target nucleic acid, wherein the antisense oligonucleotide is capable of reducing the expression of the mammalian GSK3B target nucleic acid in a cell.

[0246] An aspect of the present invention relates to an antisense oligonucleotide of 10 to 30 nucleotides in length, which comprises a contiguous nucleotide sequence of 10 to 22 nucleotides in length with at least 90% complementarity, such as full complementarity, to a mammalian GSK3B target nucleic acid, wherein the antisense oligonucleotide is capable of reducing the expression of the mammalian GSK3B target nucleic acid in a cell.

[0247] In some embodiments, the antisense oligonucleotide gapmer comprises a contiguous sequence which is at least 90% complementary, such as at least 91%, such as at least 92%, such as at least 93%, such as at least 94%, such as at least 95%, such as at least 96%, such as at least 97%, such as at least 98%, or 100% complementary with the target nucleic acid or the target sequence.

[0248] In a preferred embodiment the antisense gapmer oligonucleotide of the invention, or contiguous nucleotide sequence thereof is fully complementary (100% complementary) to the target nucleic acid or the target sequence, or in some embodiments may comprise one or two mismatches between the oligonucleotide and the target nucleic acid.

[0249] Another aspect of the present invention relates to the antisense oligonucleotide, wherein the contiguous nucleotide sequence is at least 90% complementary to a sequence selected from the group consisting of SEQ ID NO: 1, 2, 3 or 4, or a naturally occurring variant thereof.

[0250] In some embodiments the oligonucleotide sequence or contiguous nucleotide sequence is at least 90% complementary or at least 95% complementary such as fully complementary to a corresponding target sequence present in SEQ ID NO: 1 and SEQ ID NO: 4. In some embodiments the contiguous sequence of the antisense oligonucleotide is fully complementary to the mammalian GSK3B target nucleic acid.

[0251] In a preferred embodiment the oligonucleotide sequence or contiguous nucleotide sequence is 100% complementary to a corresponding target sequence present in SEQ ID NO: 1 and SEQ ID NO: 4.

[0252] Another aspect of the present invention relates to the antisense oligonucleotide, wherein the contiguous nucleotide sequence is at least 90% complementary, such as fully complementary, to an intron region present in the pre-mRNA of mammalian target nucleic acid (e.g. SEQ ID NO 1).

[0253] It shall be understood that intron positions on SEQ ID NO: 1 may vary depending on different splicing of GSK3B pre-mRNA. In the context of the present invention any nucleotide sequence in the gene sequence or pre-mRNA that is removed from the pre-mRNA by RNA splicing during maturation of the final RNA product (mature mRNA) are introns irrespectively on their position on SEQ ID NO: 1. Table 1 provides the most common intron regions in SEQ ID NO: 1.

[0254] In some embodiments the contiguous nucleotide sequence is at least 90% complementary, such as fully complementary, to an intron region present in the pre-mRNA of human GSK3B, selected from position 1072-92178 of SEQ ID NO 1; position 92373-147066 of SEQ ID NO 1; position 147151-170934 of SEQ ID NO 1; position 171046-178243 of SEQ ID NO 1; position 178375-181607 of SEQ ID NO 1; position 181715-188565 of SEQ ID NO 1; position 188664-217909 of SEQ ID NO 1; position 218006-230812 of SEQ ID NO 1; position 231000-251064 of SEQ ID NO 1 and position 251164-267562 of SEQ ID NO 1.

[0255] In some embodiments the contiguous nucleotide sequence is at least 90% complementary, such as fully complementary, to position 181715-188565 of SEQ ID NO: 1 or to position 184509 to 184845 of SEQ ID NO: 1.

[0256] In some embodiments the contiguous nucleotide sequence is at least 90% complementary, such as fully complementary, to position 1072-92178 of SEQ ID NO: 1 or to position 56154 to 56173 of SEQ ID NO: 1.

[0257] In some embodiments the contiguous nucleotide sequence is at least 90% complementary, such as fully complementary, to SEQ ID NO: 5.

[0258] In some embodiments the contiguous nucleotide sequence is at least 90% complementary, such as fully complementary, to SEQ ID NO: 20.

[0259] In some embodiments, the oligonucleotide or contiguous nucleotide sequence is complementary to a region of the target nucleic acid, wherein the target nucleic acid region is selected from the group consisting of position 184511-184530, 184587-184606, 184663-184682, 184739-184758, 184815-184834; 184512-184531, 184588-184607, 184664-184683, 184740-184759, 184816-184835; 184512-184529, 184588-184605, 184664-184681, 184740-184757, 184816-184833; 184513-184528, 184589-184604, 184665-184680, 184741-184756, 184817-184832; 184513-184526, 184589-184602, 184665-184678, 184741-184754, 184817-184830; 184518-184531, 184594-184607, 184670-184683, 184746-184759, 184822-184835; 56154-56173, 56154-56171, 56154-56169, 56154-56167, 267802-267821, 267802-267815, 267804-26821, or 267806-267821 of SEQ ID NO 1.

[0260] According to one aspect of the invention, the target sequence is repeated within the target nucleic acid, i.e. at least two identical target nucleotide sequences (target regions) of at least 10 nucleotides in length occur in the target nucleic acid at different positions. A repeated target region is generally between 10 and 50 nucleotides, such as between 11 and 30 nucleotides, such as between 12 and 25 nucleotides, such as between 13 and 22 nucleotides, such as between 14 and 20 nucleotides, such as between 15 and 19 nucleotides, such as between 16 and 18 nucleotides. In a preferred embodiment the repeated target region is between 14 and 20 nucleotides.

[0261] In one aspect the invention provides antisense oligonucleotides wherein the contiguous nucleotide sequence is at least 90% complementary, such as fully complementary, to a target region that is repeated at least 2 times across the target nucleic acid of SEQ ID NO: 1. The effect of this is that several oligonucleotide compounds (with the same sequence) can hybridize to one or more target regions on the same target nucleic acid (at the same time), which may result in multiple cleavage events of the target nucleic acid when the oligonucleotide is administered to a cell or an animal or a human.

[0262] In some embodiments the oligonucleotide or the contiguous nucleotide sequence is at least 90% complementary, such as fully complementary to a target region that is repeated at least 3 times, such as at least 4, 5, 6, 7, 8, 9 or 10 times, or that is repeated more than 10 times. In one embodiment the target region is repeated between 2 and 5 times within intron 6.

[0263] In a further embodiment the antisense oligonucleotide comprises a contiguous nucleotide sequence that is at least 90% complementary, such as fully complementary, to a target region of 10-22, such as 14-20, nucleotides in length of the target nucleic acid of SEQ ID NO: 1, wherein the target region is repeated at least 5 or more times across the introns of the target nucleic acid.

[0264] In some embodiments, the antisense oligonucleotide of the invention or the contiguous nucleotide sequence thereof is complementary to at least 5 repeated target regions in SEQ ID NO: 20.

[0265] In some embodiments, the oligonucleotide of the invention comprises or consists of 10 to 35 nucleotides in length, such as from 10 to 30, such as 11 to 22, such as from 12 to 20, such as from 14 to 18 or 14 to 16 contiguous nucleotides in length. Advantageously, the oligonucleotide comprises or consists of 14 to 20 nucleotides in length.

[0266] It is to be understood that any range given herein includes the range endpoints.

[0267] In some embodiments, the oligonucleotide or contiguous nucleotide sequence thereof comprises or consists of 22 or less nucleotides, such as 20 or less nucleotides, such as less than 18, such as 14, 15, 16 or 17 nucleotides.

[0268] In some embodiments, the contiguous nucleotide sequence comprises or consists of 10, 11, 12, 13, 14, 15, 16, 17, 18, 19, 20, 21, 22, 23, 24, 25, 26, 27, 28, 29 or 30 contiguous nucleotides in length. In a preferred embodiment, the oligonucleotide comprises or consists of 14 to 20 nucleotides in length.

[0269] In some embodiments the antisense oligonucleotide or contiguous nucleotide sequence of the invention is at least 90% identical, such as 100% identical to a sequence selected from the group consisting of SEQ ID NO: 6, 7, 8 and 9, In some embodiments the antisense oligonucleotide or contiguous nucleotide sequence of the invention is at least 90% identical, such as 100% identical to a sequence selected from the group consisting of SEQ ID NO: 10, 11, 12, 13, 14 and 15, In some embodiments the antisense oligonucleotide or contiguous nucleotide sequence thereof consists or comprises of 10 to 30 contiguous nucleotides in length with at least 90% identity, preferably 100% identity to a sequence selected from SEQ ID NO 6, 7, 8 or 9.

[0270] In some embodiments the antisense oligonucleotide or contiguous nucleotide sequence thereof consists or comprises of 10 to 30 contiguous nucleotides in length with at least 90% identity, preferably 100% identity to a sequence selected from SEQ ID NO 10, 11, 12, 13, 14 or 15.

[0271] In some embodiments the antisense oligonucleotide or contiguous nucleotide sequence thereof consists or comprises of 12 to 20 contiguous nucleotides in length with at least 90% identity, preferably 100% identity to a sequence selected from SEQ ID NO 6, 7, 8, or 9.

[0272] In some embodiments the antisense oligonucleotide or contiguous nucleotide sequence thereof consists or comprises of 12 to 20 contiguous nucleotides in length with at least 90% identity, preferably 100% identity to a sequence selected from SEQ ID NO 10, 11, 12, 13, 14 or 15.

[0273] In some embodiments the antisense oligonucleotide or contiguous nucleotide sequence thereof consists or comprises of 14 to 20 contiguous nucleotides in length with at least 90% identity, preferably 100% identity to a sequence selected from SEQ ID NO 6, 7, 8 and 9.

[0274] In some embodiments the antisense oligonucleotide or contiguous nucleotide sequence thereof consists or comprises of 14 to 20 contiguous nucleotides in length with at least 90% identity, preferably 100% identity to a sequence selected from SEQ ID NO 10, 11, 12, 13, 14 or 15.

[0275] In some embodiments, the antisense oligonucleotide or contiguous nucleotide sequence thereof comprises a sequence selected from SEQ ID NO: 6, 7, 8 or 9.

[0276] In some embodiments, the antisense oligonucleotide or contiguous nucleotide sequence thereof comprises a sequence selected from SEQ ID NO: 10, 11, 12, 13, 14 or 15.

[0277] Another aspect of the present invention relates to the antisense oligonucleotide, wherein the contiguous nucleotide sequence is at least 90% complementary, such as fully complementary, to an exon in the pre-mRNA of mammalian GSK3B target nucleic acid (e.g. SEQ ID NO 1).

[0278] In some embodiments, the antisense oligonucleotide or contiguous nucleotide sequence targets exon 11 of a mammalian GSK3B target nucleic acid, such as position 267563 to 273095 of SEQ ID NO: 1.

[0279] In some embodiments, the antisense oligonucleotide or the contiguous nucleotide sequence is fully complementary to position 267802-267821 of SEQ ID NO: 1.

[0280] In some embodiments, the antisense oligonucleotide or contiguous nucleotide sequence of the invention is at least 90% identical, such as 100% identical to a sequence selected from the group consisting of 16, 17, 18 and 19.

[0281] In some embodiments, the antisense oligonucleotide or contiguous nucleotide sequence thereof consists or comprises of 10 to 30 contiguous nucleotides in length with at least 90% identity, preferably 100% identity to a sequence selected from SEQ ID NO: 16, 17, 18 or 19.

[0282] In some embodiments, the antisense oligonucleotide or contiguous nucleotide sequence thereof consists or comprises of 12 to 20 contiguous nucleotides in length with at least 90% identity, preferably 100% identity to a sequence selected from SEQ ID NO: 16, 17, 18 or 19.

[0283] In some embodiments, the antisense oligonucleotide or contiguous nucleotide sequence thereof consists or comprises of 14 to 20 contiguous nucleotides in length with at least 90% identity, preferably 100% identity to a sequence selected from SEQ ID NO: 16, 17, 18 or 19.

[0284] In some embodiments, the antisense oligonucleotide or contiguous nucleotide sequence thereof comprises a sequence selected from SEQ ID NO: 16, 17, 18 or 19.

[0285] Oligonucleotide compounds represent specific designs of a motif sequence. Capital letters represent beta-D-oxy LNA nucleosides, lowercase letters represent DNA nucleosides, all LNA C are 5-methyl cytosine, and 5-methyl DNA cytosines are presented by “e”, all internucleoside linkages are, preferably, phosphorothioate internucleoside linkages.

[0286] It is understood that the contiguous nucleobase sequences (motif sequence) can be modified to for example increase nuclease resistance and/or binding affinity to the target nucleic acid.

[0287] Modifications are described in the definitions and in the following paragraphs. Table 4 lists preferred designs of each motif sequence.

[0288] The pattern in which the modified nucleosides (such as high affinity modified nucleosides) are incorporated into the oligonucleotide sequence is generally termed oligonucleotide design.

[0289] The oligonucleotides of the invention are designed with modified nucleosides and DNA nucleosides. Advantageously, high affinity modified nucleosides are used.

[0290] In an embodiment, the oligonucleotide comprises at least 1 modified nucleoside, such as at least 2, at least 3, at least 4, at least 5, at least 6, at least 7, at least 8, at least 9, at least 10, at least 11, at least 12, at least 13, at least 14, at least 15 or at least 16 modified nucleosides. In an embodiment the oligonucleotide comprises from 1 to 10 modified nucleosides, such as from 2 to 9 modified nucleosides, such as from 3 to 8 modified nucleosides, such as from 4 to 7 modified nucleosides, such as 6 or 7 modified nucleosides. Suitable modifications are described in the “Definitions” section under “modified nucleoside”, “high affinity modified nucleosides”, “sugar modifications”, “2′ sugar modifications” and Locked nucleic acids (LNA)″.

[0291] In an embodiment, the oligonucleotide comprises one or more sugar modified nucleosides, such as 2′ sugar modified nucleosides. Preferably the oligonucleotide of the invention comprise one or more 2′ sugar modified nucleoside independently selected from the group consisting of 2′-O-alkyl-RNA, 2′-O-methyl-RNA, 2′-alkoxy-RNA, 2′-O-methoxyethyl-RNA, 2′-amino-DNA, 2′-fluoro-DNA, arabino nucleic acid (ANA), 2′-fluoro-ANA and LNA nucleosides. It is advantageous if one or more of the modified nucleoside(s) is a locked nucleic acid (LNA).

[0292] In a further embodiment the oligonucleotide comprises at least one modified internucleoside linkage. Suitable internucleoside modifications are described in the “Definitions” section under “Modified internucleoside linkage”. It is advantageous if at least 75%, such as all, the internucleoside linkages within the contiguous nucleotide sequence are phosphorothioateinternucleoside linkages. In some embodiments all the internucleotide linkages in the contiguous sequence of the oligonucleotide are phosphorothioate linkages.

[0293] In some embodiments, the oligonucleotide of the invention comprises at least one LNA nucleoside, such as 1, 2, 3, 4, 5, 6, 7, or 8 LNA nucleosides, such as from 2 to 6 LNA nucleosides, such as from 3 to 7 LNA nucleosides, 4 to 8 LNA nucleosides or 3, 4, 5, 6, 7 or 8 LNA nucleosides. In some embodiments, at least 75% of the modified nucleosides in the oligonucleotide are LNA nucleosides, such as 80%, such as 85%, such as 90% of the modified nucleosides are LNA nucleosides. In a still further embodiment all the modified nucleosides in the oligonucleotide are LNA nucleosides. In a further embodiment, the oligonucleotide may comprise both beta-D-oxy-LNA, and one or more of the following LNA nucleosides: thio-LNA, amino-LNA, oxy-LNA, ScET and/or ENA in either the beta-D or alpha-L configurations or combinations thereof. In a further embodiment, all LNA cytosine units are 5-methyl-cytosine. It is advantageous for the nuclease stability of the oligonucleotide or contiguous nucleotide sequence to have at least 1 LNA nucleoside at the 5′ end and at least 2 LNA nucleosides at the 3′ end of the nucleotide sequence.

[0294] In an embodiment of the invention the oligonucleotide of the invention is capable of recruiting RNase H.

[0295] In the current invention an advantageous structural design is a gapmer design as described in the “Definitions” section under for example “Gapmer”, “LNA Gapmer”, “MOE gapmer” and “Mixed Wing Gapmer” “Alternating Flank Gapmer”. The gapmer design includes gapmers with uniform flanks, mixed wing flanks, alternating flanks, and gapbreaker designs. In the present invention it is advantageous if the oligonucleotide of the invention is a gapmer with an F-G-F′ design. In some embodiments the gapmer is an LNA gapmer with uniform flanks.

[0296] In some embodiments of the invention the LNA gapmer is selected from the following uniform flank designs In preferred embodiments the F-G-F′ design is selected from 2-15-3; 3-15-2; 4-11-3; 3-11-4; 3-9-4, 2-10-4; 3-8-3; 4-6-4.

### Exemplary Compounds of the Invention

[0297] In the exemplified oligonucleotide compounds, capital letters represent beta-D-oxy LNA nucleosides, lowercase letters represent DNA nucleosides, all LNA C are 5-methyl cytosine, and 5-methyl DNA cytosines are presented by “e” or ^{m}c, all internucleoside linkages are phosphorothioate internucleoside linkages.

[0298] For certain embodiments of the invention, the oligonucleotide is selected from the group of oligonucleotide compounds with CMP-ID-NO: 10_1; 11_1, 12_1, 12_2, 13_1, 13_2, 14_1 or 15_1.

[0299] For certain embodiments of the invention, the oligonucleotide is selected from the group of oligonucleotide compounds with CMP-ID-NO: 122, 13_1, 13_2 or 14_1.

[0300] For certain embodiments of the invention, the oligonucleotide is selected from the group of oligonucleotide compounds with CMP-ID-NO: 6_1, 7_1, 8_1 or 9_1.

[0301] For certain embodiments of the invention, the oligonucleotide is selected from the group of oligonucleotide compounds with CMP-ID-NO: 16_1, 17_1, 18_1 or 19_1.

### Method of Manufacture

[0302] In a further aspect, the invention provides methods for manufacturing the oligonucleotides of the invention comprising reacting nucleotide units and thereby forming covalently linked contiguous nucleotide units comprised in the oligonucleotide. Preferably, the method uses phophoramidite chemistry (see for example Caruthers et al, 1987, Methods in Enzymology vol. 154, pages 287-313). In a further embodiment the method further comprises reacting the contiguous nucleotide sequence with a conjugating moiety (ligand). In a further aspect a method is provided for manufacturing the composition of the invention, comprising mixing the oligonucleotide or conjugated oligonucleotide of the invention with a pharmaceutically acceptable diluent, solvent, carrier, salt and/or adjuvant.

### Pharmaceutical Salt

[0303] In a further aspect the invention provides a pharmaceutically acceptable salt of the antisense oligonucleotide or a conjugate thereof. In a preferred embodiment, the pharmaceutically acceptable salt is a sodium or a potassium salt.

### Pharmaceutical Composition

[0304] In a further aspect, the invention provides pharmaceutical compositions comprising any of the aforementioned oligonucleotides and/or oligonucleotide conjugates or salts thereof and a pharmaceutically acceptable diluent, carrier, salt and/or adjuvant. A pharmaceutically acceptable diluent includes phosphate-buffered saline (PBS) and pharmaceutically acceptable salts include, but are not limited to, sodium and potassium salts. In some embodiments the pharmaceutically acceptable diluent is sterile phosphate buffered saline. In some embodiments the oligonucleotide is used in the pharmaceutically acceptable diluent at a concentration of 50-300 μM solution.

[0305] Suitable formulations for use in the present invention are found in Remington's Pharmaceutical Sciences, Mack Publishing Company, Philadelphia, Pa., 17th ed., 1985. For a brief review of methods for drug delivery, see, e.g., Langer (Science 249:1527-1533, 1990). WO 2007/031091 provides further suitable and preferred examples of pharmaceutically acceptable diluents, carriers and adjuvants (hereby incorporated by reference). Suitable dosages, formulations, administration routes, compositions, dosage forms, combinations with other therapeutic agents, pro-drug formulations are also provided in WO2007/031091.

[0306] Oligonucleotides or oligonucleotide conjugates of the invention may be mixed with pharmaceutically acceptable active or inert substances for the preparation of pharmaceutical compositions or formulations. Compositions and methods for the formulation of pharmaceutical compositions are dependent upon a number of criteria, including, but not limited to, route of administration, extent of disease, or dose to be administered.

[0307] These compositions may be sterilized by conventional sterilization techniques, or may be sterile filtered. The resulting aqueous solutions may be packaged for use as is, or lyophilized, the lyophilized preparation being combined with a sterile aqueous carrier prior to administration. The pH of the preparations typically will be between 3 and 11, more preferably between 5 and 9 or between 6 and 8, and most preferably between 7 and 8, such as 7 to 7.5. The resulting compositions in solid form may be packaged in multiple single dose units, each containing a fixed amount of the above-mentioned agent or agents, such as in a sealed package of tablets or capsules. The composition in solid form can also be packaged in a container for a flexible quantity, such as in a squeezable tube designed for a topically applicable cream or ointment.

[0308] In some embodiments, the oligonucleotide or oligonucleotide conjugate of the invention is a prodrug. In particular with respect to oligonucleotide conjugates the conjugate moiety is cleaved of the oligonucleotide once the prodrug is delivered to the site of action, e.g. the target cell.

### Applications

[0309] The oligonucleotides of the invention may be utilized as research reagents for, for example, diagnostics, therapeutics and prophylaxis.

[0310] In research, such oligonucleotides may be used to specifically modulate the synthesis of GSK3B protein in cells (e.g. in vitro cell cultures) and experimental animals thereby facilitating functional analysis of the target or an appraisal of its usefulness as a target for therapeutic intervention. Typically the target modulation is achieved by degrading or inhibiting the pre-mRNA or mRNA producing the protein, thereby prevent protein formation or by degrading or inhibiting a modulator of the gene or mRNA producing the protein. Further advantages may be achieved by targeting pre-mRNA thereby preventing formation of the mature mRNA.

[0311] If employing the oligonucleotide of the invention in research or diagnostics the target nucleic acid may be a cDNA or a synthetic nucleic acid derived from DNA or RNA.

[0312] The present invention provides an in vivo or in vitro method for modulating GSK3B expression in a target cell, which is expressing GSK3B, said method comprising administering an oligonucleotide of the invention in an effective amount to said cell.

[0313] In some embodiments, the target cell, is a mammalian cell in particular a human cell. The target cell may be an in vitro cell culture or an in vivo cell forming part of a tissue in a mammal. In preferred embodiments the target cell is present in a tumor, in the liver, in adipose tissue, in peripheral nerves or in the CNS. In particular, target cells in the brain, in neurons, such as peripheral neurons, axon cells or ganglion, such as dorsal root ganglia or basal ganglia or neve fibers are of interest.

[0314] In diagnostics the oligonucleotides may be used to detect and quantitate GSK3B expression in cell and tissues by northern blotting, in-situ hybridisation or similar techniques.

[0315] For therapeutics, an animal or a human, suspected of having a disease or disorder, which can be treated by modulating the expression of GSK3B.

[0316] The invention provides methods for treating or preventing a disease, comprising administering a therapeutically or prophylactically effective amount of an oligonucleotide, an oligonucleotide conjugate or a pharmaceutical composition of the invention to a subject suffering from or susceptible to the disease.

[0317] The invention also relates to an oligonucleotide, a composition or a conjugate as defined herein for use as a medicament.

[0318] The oligonucleotide, oligonucleotide conjugate or a pharmaceutical composition according to the invention is typically administered in an effective amount.

[0319] The invention also provides for the use of the oligonucleotide or oligonucleotide conjugate of the invention as described for the manufacture of a medicament for the treatment of a disorder as referred to herein, or for a method of the treatment of as a disorder as referred to herein.

[0320] The disease or disorder, as referred to herein, is associated with expression of GSK3B.

[0321] The methods of the invention are preferably employed for treatment or prophylaxis against diseases caused by abnormal levels and/or activity of GSK3B.

[0322] The invention further relates to use of an oligonucleotide, oligonucleotide conjugate or a pharmaceutical composition as defined herein for the manufacture of a medicament for the treatment of abnormal levels and/or activity of GSK3B.

[0323] In one embodiment, the invention relates to oligonucleotides, oligonucleotide conjugates or pharmaceutical compositions for use in the treatment or alleviation of diseases or disorders selected from of cancer, inflammatory disease, neurological diseases, neurological injury, neuronal degeneration, psychiatric diseases and Type 2 diabetes.

[0324] Cancers where GSK3B downregulation may be beneficial, can be selected from the group consisting of hepatocellular carcinoma (HHC), breast cancer, ovarian cancer, prostate cancer, colon cancer, renal cancer, thyroid cancer, pancreatic cancer and leukemia. The oligonucleotides, oligonucleotide conjugates or pharmaceutical compositions of the present invention may be advantageous in the treatment of hepatocellular carcinoma (HHC), in particular if associated with Type 2 diabetes.

[0325] Type 2 diabetes patients also benefit from treatment with oligonucleotides, oligonucleotide conjugates or pharmaceutical compositions of the present invention, by stimulating insulin-dependent removal of sugar from the blood.

[0326] Inflammatory disease where GSK3B downregulation may be beneficial can be selected from the group consisting of asthma, arthritis, colitis, and peritonitis.

[0327] Neurological diseases, and neuronal degeneration where GSK3B downregulation may be beneficial encompasses diseases such as Alzheimer's disease, Down syndrome, fragile X syndrome, Huntington's disease Parkinson's disease, spinocerebellar ataxia type 1 as well as neurological disorders resulting from traumatic brain injury, stroke, and related conditions that involve axonal disconnection. In particular, the cognitive functions in patients with these diseases may be improved following treatment with oligonucleotides, oligonucleotide conjugates or pharmaceutical compositions of the present invention.

[0328] Neurological injury where GSK3B downregulation may be beneficial is for example traumatic injury to the peripheral nervous system, where axon and peripheral nerve growth may be stimulated to improve or restore peripheral nerve function.

[0329] Psychiatric disease where GSK3B downregulation may be beneficial may be selected from bipolar disorder, depression, anxiety or schizophrenia.

### Administration

[0330] The oligonucleotides or pharmaceutical compositions of the present invention may be administered enteral (such as, orally or through the gastrointestinal tract) or parenteral (such as, intravenous, subcutaneous, intra-muscular, intracerebral, intracerebroventricular or intrathecal).

[0331] In a non-limiting embodiment the antisense oligonucleotide, a conjugate, a pharmaceutical salt or pharmaceutical compositions of the present invention are administered by a parenteral route including intravenous, intraarterial, subcutaneous, intraperitoneal or intramuscular injection or infusion.

[0332] In one embodiment the active oligonucleotide or oligonucleotide conjugate or pharmaceutical composition is administered intravenously.

[0333] In another embodiment the active oligonucleotide or oligonucleotide conjugate or pharmaceutical composition is administered subcutaneously.

[0334] Alternatively, the oligonucleotides can be administered locally, e.g. via injection into the affected neurons such as peripheral neurons or injection into ganglion, such as dorsal root ganglia or basal ganglia or injection in the area surrounding the affected neurons or neve fibers or injection into a joint with neuronal damage.

[0335] The oligonucleotides can also be administered locally into the central nervous system (CNS) for example via intracranial, e.g. intracerebral or intraventricular, intravitreal administration or via the cerebrospinal fluid (CSF) using intrathecal administration or lumbar puncture. In one embodiment the active oligonucleotide or oligonucleotide conjugate is administered locally. In another embodiment the active oligonucleotide or oligonucleotide conjugate is administered to the CNS.

[0336] In some embodiments, the antisense oligonucleotide, oligonucleotide conjugate or pharmaceutical composition of the invention is administered at a dose of 0.1-15 mg/kg, such as from 0.2-10 mg/kg, such as from 0.25-5 mg/kg. The administration can be once a week, every 2ⁿd week, every third week or even once a month.

[0337] The invention also provides for the use of the antisense oligonucleotide or oligonucleotide conjugate of the invention as described for the manufacture of a medicament wherein the medicament is in a dosage form for subcutaneous administration. The invention also provides for the use of the oligonucleotide or oligonucleotide conjugate of the invention as described for the manufacture of a medicament wherein the medicament is in a dosage form for intravenous administration. The invention also provides for the use of the oligonucleotide or oligonucleotide conjugate of the invention as described for the manufacture of a medicament wherein the medicament is in a dosage form for local administration. The invention also provides for the use of the oligonucleotide or oligonucleotide conjugate of the invention as described for the manufacture of a medicament wherein the medicament is in a dosage form for CNS or CSF administration. The invention also provides for the use of the oligonucleotide or oligonucleotide conjugate of the invention as described for the manufacture of a medicament wherein the medicament is in a dosage form for intrathecal administration.

### Embodiments

[0338] The following embodiments of the present invention may be used in combination with any other embodiments described herein.

1. An antisense oligonucleotide of 10 to 50 nucleotides in length, which comprises a contiguous nucleotide sequence of 10 to 30 nucleotides in length with at least 90% complementarity, such as fully complementary, to a mammalian GSK3B target nucleic acid, wherein the antisense oligonucleotide is capable of reducing the expression of the mammalian GSK3B target nucleic acid, in a cell.
2. The antisense oligonucleotide according to embodiment 1, wherein the contiguous nucleotide sequence is at least 90% complementary, such as fully complementary to a sequence selected from the group consisting of SEQ ID NO: 1, 2, 3, and 4, or a naturally occurring variant thereof.
3. The antisense oligonucleotide of embodiments 1 or 2, wherein the contiguous nucleotide sequence is fully complementary to the mammalian GSK3B target sequence.
4. The antisense oligonucleotide of any of embodiments 1 to 3, wherein the wherein the contiguous nucleotide sequence targets exon 11 of a mammalian GSK3B target nucleic acid, such as position 267563 to 273095 of SEQ ID NO: 1.
5. The antisense oligonucleotide of any of embodiments 1 to 4, wherein the contiguous nucleotide sequence is fully complementary to position 267802-267821 of SEQ ID NO: 1.
6. The antisense oligonucleotide of any of embodiments 1 to 3, wherein the contiguous nucleotide sequence is at least 90% complementary, such as fully complementary, to an intron region present in the pre-mRNA of mammalian GSK3B target nucleic acid (e.g. SEQ ID NO 1).
7. The antisense oligonucleotide according to any of embodiments 1 to 3 or 6, wherein the contiguous nucleotide sequence is at least 90% complementary, such as fully complementary, to an intron region present in the pre-mRNA of human GSK3B, selected from intron 1 (1072-92178 of SEQ ID NO: 1); intron 2 (92373-147066 of SEQ ID NO: 1); intron 3 (147151-170934 of SEQ ID NO 1); intron 4 (171046-178243 of SEQ ID NO: 1); intron 5 (171046-178243 of SEQ ID NO: 1); intron 6 (181715-188565 of SEQ ID NO: 1); intron 7 (188664-217909 of SEQ ID NO: 1); intron 8 (218006-230812 of SEQ ID NO: 1); intron 9 (231000-251064 of SEQ ID NO: 1) and intron 10 (251164-267562 of SEQ ID NO: 1).
8. The antisense oligonucleotide according to any one of embodiments 1 to 3 or 6 or 7, wherein the contiguous nucleotide sequence is at least 90% complementary, such as fully complementary, to position 181715-188565 of SEQ ID NO: 1 or to position 184509 to 184845 of SEQ ID NO: 1.
9. The antisense oligonucleotide according to any of embodiments 1 to 3, 6 or 7, wherein the contiguous nucleotide sequence is at least 90% complementary, such as fully complementary, to position 1072-92178 of SEQ ID NO: 1 or to position 56154 to 56173 of SEQ ID NO: 1.
10. The antisense oligonucleotide according to any of embodiments 1 to 3, 6 or 7, wherein the contiguous nucleotide sequence is at least 90% complementary, such as fully complementary, to SEQ ID NO: 5 or SEQ ID NO: 20.
11. The antisense oligonucleotide of any one of embodiments 1 to 3, 6 to 8 or 10, wherein the contiguous nucleotide sequence is at least 90% complementary, such as fully complementary, to a target region of SEQ ID NO 1, selected from the group consisting of position 184511-184530, 184587-184606, 184663-184682, 184739-184758, 184815-184834; 184512-184531, 184588-184607, 184664-184683, 184740-184759, 184816-184835; 184512-184529, 184588-184605, 184664-184681, 184740-184757, 184816-184833; 184513-184528, 184589-184604, 184665-184680, 184741-184756, 184817-184832; 184513-184526, 184589-184602, 184665-184678, 184741-184754, 184817-184830; 184518-184531, 184594-184607, 184670-184683, 184746-184759, and 184822-184835 of SEQ ID NO 1.
12. The antisense oligonucleotide according to any of embodiments 1 to 3, 6 to 8, 10 or 11, wherein the contiguous nucleotide sequence is at least 90% complementary, such as fully complementary, to a target sequence of 10-22, such as 14-20 nucleotides in length of the target nucleic acid of SEQ ID NO: 1, wherein the target sequence is repeated at least 5 or more times across the target nucleic acid.
13. The antisense oligonucleotide of any one of embodiments 1 to 12, wherein the oligonucleotide is capable of hybridizing to a target nucleic acid selected from the group consisting of SEQ ID NO: 1, 2 and 3 with a ΔG° below −10 kcal.
14. The antisense oligonucleotide of embodiments 1 to 13, wherein the target nucleic acid is RNA.
15. The antisense oligonucleotide of embodiment 14, wherein the mRNA is pre-mRNA or mature mRNA.
16. The antisense oligonucleotide of any of embodiments 1 to 15, wherein the contiguous nucleotide sequence comprises or consists of at least 10 contiguous nucleotides, particularly 11, 12, 13, 14, 15, 16, 17, 18, 19, 20, 21, 22, 23, 24, 25, 26, 27, 28 or 29 contiguous nucleotides.
17. The antisense oligonucleotide of embodiments 1 to 16, wherein the contiguous nucleotide sequence comprises or consists of from 12 to 22 nucleotides.
18. The antisense oligonucleotide of any one of embodiments 1 to 17, wherein the contiguous nucleotide sequence comprises or consists of from 14 to 20 nucleotides.
19. The antisense oligonucleotide of any one of embodiments 1 to 16, wherein the antisense oligonucleotide comprises or consists of 12 to 35 nucleotides in length.
20. The antisense oligonucleotide of any one of embodiments 1 to 16, wherein the antisense oligonucleotide comprises or consists of 14 to 25 nucleotides in length.
21. The antisense oligonucleotide of any one of embodiments 1 to 20, wherein the oligonucleotide or contiguous nucleotide sequence is single stranded.
22. The antisense oligonucleotide of any one of embodiments 1 to 21, wherein the oligonucleotide is neither siRNA nor self-complementary.
23. The antisense oligonucleotide of any one of embodiments 1 to 3, 6 to 8 or 10 to 22 excluding dependency on embodiments 4, 5 or 9, wherein the contiguous nucleotide sequence comprises or consists of a sequence selected from SEQ ID NO: 10, 11, 12, 13, 14 or 15.
24. The antisense oligonucleotide of any one of embodiments 1 to 5, or 13 to 22 (excluding dependency on embodiment 6 to 12), wherein the contiguous nucleotide sequence comprises or consists of a sequence selected from SEQ ID NO: 6, 7, 8 or 9.
25. The antisense oligonucleotide of any one of embodiments 1 to 3, 6, 7, 9, or 13 to 22 (excluding dependency on embodiment 4, 5, 8 and 10 to 12), wherein the contiguous nucleotide sequence comprises or consists of a sequence selected from SEQ ID NO: 16, 17, 18 or 19.
26. The antisense oligonucleotide of any one of embodiments 1 to 23, wherein the contiguous nucleotide sequence has zero to three mismatches compared to the target nucleic acid it is complementary to.
27. The antisense oligonucleotide of embodiment 26, wherein the contiguous nucleotide sequence has one mismatch compared to the target nucleic acid.
28. The antisense oligonucleotide of embodiment 26, wherein the contiguous nucleotide sequence has two mismatches compared to the target nucleic acid.
29. The antisense oligonucleotide of any one of embodiments 1 to 28, comprising one or more modified nucleosides.
30. The antisense oligonucleotide of embodiment 29, wherein the one or more modified nucleoside is a high-affinity modified nucleosides.
31. The antisense oligonucleotide of any one of embodiments 29 or 30, wherein the one or more modified nucleoside is a 2′ sugar modified nucleoside.
32. The antisense oligonucleotide of embodiment 31, wherein the one or more 2′ sugar modified nucleoside is independently selected from the group consisting of 2′-O-alkyl-RNA, 2′-O-methyl-RNA, 2′-alkoxy-RNA, 2′-O-methoxyethyl-RNA, 2′-amino-DNA, 2′-fluoro-DNA, arabino nucleic acid (ANA), 2′-fluoro-ANA and LNA nucleosides.
33. The antisense oligonucleotide of any one of embodiments 31 or 32, wherein the antisense oligonucleotide comprises 3 to 6 2′ sugar modified nucleosides.
34. The antisense oligonucleotide of any one of embodiments 1 to 33, wherein the oligonucleotide comprises at least one modified internucleoside linkage.
35. The antisense oligonucleotide of embodiment 34, wherein the modified internucleoside linkage is nuclease resistant.
36. The antisense oligonucleotide of any one of embodiments 34 or 35, wherein at least 50% of the internucleoside linkages within the contiguous nucleotide sequence are phosphorothioate internucleoside linkages internucleoside linkages.
37. The antisense oligonucleotide of any one of embodiments 34 to 36, wherein all the internucleoside linkages within the contiguous nucleotide sequence are phosphorothioate internucleoside linkages.
38. The antisense oligonucleotide of any one of embodiments 1 to 37, wherein the oligonucleotide is capable of recruiting RNase H.
39. The antisense oligonucleotide of embodiment 38, wherein the oligonucleotide is a gapmer.
40. The antisense oligonucleotide of any one of embodiments 1 to 39, wherein the antisense oligonucleotide or contiguous nucleotide sequence thereof consists of or comprises a gapmer of formula 5′-F-G-F′-3′, where region F and F′ independently comprise or consist of 1-8 nucleosides, of which 1-4 are 2′ sugar modified and defines the 5′ and 3′ end of the F and F′ region, and G is a region between 6 and 16 nucleosides which are capable of recruiting RNaseH.
41. The oligonucleotide of embodiment 40, wherein the 2′ sugar modified nucleoside independently is selected from the group consisting of 2′-O-alkyl-RNA, 2′-O-methyl-RNA, 2′-alkoxy-RNA, 2′-O-methoxyethyl-RNA, 2′-amino-DNA, 2′-fluoro-DNA, arabino nucleic acid (ANA), 2′-fluoro-ANA and LNA nucleosides.
42. The antisense oligonucleotide of any one of embodiments 40 or 41, wherein one or more of the modified nucleosides in region F and F′ is a LNA nucleoside.
43. The antisense oligonucleotide of embodiment 42, wherein all the modified nucleosides in region F and F′ are LNA nucleosides.
44. The antisense oligonucleotide of embodiment 43, wherein region F and F′ consist of LNA nucleosides.
45. The antisense oligonucleotide of any one of embodiments 45 to 47, wherein all the modified nucleosides in region F and F′ are oxy-LNA nucleosides.
46. The antisense oligonucleotide of any one of embodiments 42-45, wherein the LNA nucleoside is selected from beta-D-oxy-LNA, alpha-L-oxy-LNA, beta-D-amino-LNA, alpha-L-amino-LNA, beta-D-thio-LNA, alpha-L-thio-LNA, (S)cET, (R)cET beta-D-ENA and alpha-L-ENA.
47. The antisense oligonucleotide of any one of embodiment 42-45, wherein the LNA nucleoside is oxy-LNA.
48. The antisense oligonucleotide of any one of embodiments 42-45, wherein the LNA nucleoside is beta-D-oxy-LNA.
49. The antisense oligonucleotide of any one of embodiments 42-45, wherein the LNA nucleoside is thio-LNA.
50. The antisense oligonucleotide of any one of embodiments 42-45, wherein the LNA nucleoside is amino-LNA.
51. The antisense oligonucleotide of embodiment any one of embodiments 42-45, wherein the LNA nucleoside is cET.
52. The antisense oligonucleotide of any one embodiment of 42-45, wherein the LNA nucleoside is ENA.
53. The antisense oligonucleotide of embodiment 42, wherein at least one of region F or F′ further comprises at least one 2′ sugar substituted nucleoside independently selected from the group consisting of 2′-O-alkyl-RNA, 2′-O-methyl-RNA, 2′-alkoxy-RNA, 2′-O-methoxyethyl-RNA, 2′-amino-DNA and 2′-fluoro-DNA.
54. The antisense oligonucleotide of any one of embodiments 40 to 53, wherein the RNaseH recruiting nucleosides in region G are independently selected from DNA, alpha-L-LNA, C4′ alkylated DNA, ANA and 2′F-ANA and UNA.
55. The antisense oligonucleotide of embodiment 54, wherein the nucleosides in region G is DNA and/or alpha-L-LNA nucleosides.
56. The antisense oligonucleotide of embodiment 54 or 55, wherein region G consists of at least 75% DNA nucleosides.
57. The antisense oligonucleotide of any one of embodiments 54 to 56, wherein all the nucleosides in region G are DNA nucleosides.
58. The antisense oligonucleotide according to any one of embodiments 1 to 3, 6 to 8, 10 to 23 (excluding dependency on embodiments 4, 5 or 9), 26 to 58 (excluding dependency on embodiments 4, 5, 9, 24 and 25), wherein the antisense oligonucleotide or contiguous nucleotide sequence thereof is selected from the group consisting of TAatggtctctattcagTTC (Compound ID 10_1); CTAatggtctctattcagTT (Compound ID 11_1); AATGgtctctattcaGTT (Compound ID 12_1); AATggtctctattcAGTT (Compound ID 12_2); ATGgtctctattCAGT (Compound ID 13_1); ATggtctctattCAGT (Compound ID 13_2); GGTctctattcAGT (Compound ID 14_1); and CTAAtggtctCTAT (Compound ID 15_1), wherein capital letters represent LNA nucleosides, such as beta-D-oxy LNA, lower case letters represent DNA nucleosides, optionally all LNA C are 5-methyl cytosine, and at least one, preferably all internucleoside linkages are phosphorothioate internucleoside linkages.
59. The oligonucleotide of embodiment 58, wherein the oligonucleotide is selected from CMP ID NO:10_1; 11_1; 12_1; 12_2; 13_1; 13_2; 14_1 or 15_1.
60. The antisense oligonucleotide according to any one of embodiments 1 to 3, 6, 7, 9, 13 to 22 (excluding dependency on embodiment 4, 5, 8 10 to 12), 24, or 26 to 58 (excluding dependency on embodiments 4, 5, 8, 10 to 12, 23 and 25), wherein the antisense oligonucleotide or contiguous nucleotide sequence thereof is selected from the group consisting of TTAgttatcataattcacCC (Compound ID 6_1); AGTTatcataattcacCC (Compound ID 7_1); TTATcataattcACCC (Compound ID 8_1); and ATCAtaattcACCC (Compound ID 9_1), wherein capital letters represent LNA nucleosides, such as beta-D-oxy LNA, lower case letters represent DNA nucleosides, optionally all LNA C are 5-methyl cytosine, and at least one, preferably all internucleoside linkages are phosphorothioate internucleoside linkages.
61. The oligonucleotide of embodiment 60, wherein the oligonucleotide is selected from CMP ID NO: 6_1; 7_1; 8_1; or 9_1.
62. The antisense oligonucleotide according to any one of embodiments 1 to 5, 13 to 22 (excluding dependency on embodiment 6 to 12), 25 or 26 to 58 (excluding dependency on embodiments on embodiment 6 to 12, 23 and 24), wherein the antisense oligonucleotide or contiguous nucleotide sequence thereof is selected from the group consisting of ATGAaattggtttgtaTTTA (Compound ID 16_1); TTGGtttgtaTTTA (Compound ID 17_1), ATGAaattggtttgTATT (Compound ID 18_1), and ATGAaattggttTGTA (Compound ID 19_1), wherein capital letters represent LNA nucleosides, such as beta-D-oxy LNA, lower case letters represent DNA nucleosides, optionally all LNA C are 5-methyl cytosine, and at least one, preferably all internucleoside linkages are phosphorothioate internucleoside linkages.
63. The oligonucleotide of embodiment 62, wherein the oligonucleotide is selected from CMP ID NO: 16_1; 17_1; 18_1; and 19_1.
64. A conjugate comprising the antisense oligonucleotide according to any one of embodiments 1 to 63, and at least one conjugate moiety covalently attached to said antisense oligonucleotide.
65. The antisense oligonucleotide conjugate of embodiment 64, wherein the conjugate moiety is selected from carbohydrates, cell surface receptor ligands, drug substances, hormones, lipophilic substances, polymers, proteins, peptides, toxins, vitamins, viral proteins or combinations thereof.
66. The antisense oligonucleotide conjugate of embodiment 64 or 65, wherein the conjugate moiety is capable of binding to the asialoglycoprotein receptor.
67. The antisense oligonucleotide conjugate of any one of embodiments 64 to 66, comprising a linker which is positioned between the antisense oligonucleotide and the conjugate moiety.
68. The antisense oligonucleotide conjugate of embodiment 67, wherein the linker is a physiologically labile linker.
69. The antisense oligonucleotide conjugate of embodiment 68, wherein the physiologically labile linker is nuclease susceptible linker.
70. The antisense oligonucleotide conjugate of embodiments 64 to 69, wherein the oligonucleotide has the formula D′—F-G-F′ or F-G-F′-D″, wherein F, F′ and G are as defined in embodiments 40 to 57 and D′ or D″ comprises 1, 2 or 3 DNA nucleosides with phosphorothioate internucleoside linkages.
71. A pharmaceutically acceptable salt of the antisense oligonucleotide according to any one of embodiments 1 to 63 or the conjugate according to any of embodiments 64 to 70.
72. A pharmaceutical composition comprising the antisense oligonucleotide of any one of embodiments 1 to 63 or the conjugate according to any of embodiments 64 to 70, or the pharmaceutically acceptable salt of embodiment 71 and a pharmaceutically acceptable diluent, carrier, salt and/or adjuvant.
73. A method for manufacturing the antisense oligonucleotide of any one of embodiments 1 to 63, comprising reacting nucleotide units thereby forming covalently linked contiguous nucleotide units comprised in the oligonucleotide.
74. The method of embodiment 73, further comprising reacting the contiguous nucleotide sequence with a non-nucleotide conjugation moiety.
75. A method for manufacturing the composition of embodiment 72, comprising mixing the oligonucleotide with a pharmaceutically acceptable diluent, carrier, salt and/or adjuvant.
76. An in vivo or in vitro method for reducing GSK3B expression in a target cell which is expressing the mammalian GSK3B, said method comprising administering the antisense oligonucleotide of any one of embodiments 1 to 63 or the conjugate according to any of embodiments 64 to 70 or the pharmaceutical salt of embodiment 71 or the pharmaceutical composition of embodiment 72 in an effective amount to said cell.
77. A method for treating, alleviating or preventing a disease comprising administering a therapeutically or prophylactically effective amount of the antisense oligonucleotide of any one of embodiments 1 to 63 or the conjugate according to any of embodiments 64 to 70 or the pharmaceutical salt of embodiment 71 or the pharmaceutical composition of embodiment 72 to a subject suffering from or susceptible to the disease.
78. The antisense oligonucleotide of anyone of embodiments 1 to 63 or the conjugate according to any of embodiments 64 to 70 or the pharmaceutical salt of embodiment 71 or the pharmaceutical composition of embodiment 72, for use as a medicament for treatment alleviation or prevention of a disease in a subject.
79. Use of the oligonucleotide of antisense oligonucleotide of any one of embodiment 1 to 63 or the conjugate according to any of embodiments 64 to 70 for the preparation of a medicament for treatment or prevention of a disease in a subject.
80. The method, the antisense oligonucleotide or the use of any one of embodiments 76 to 79, wherein the disease is associated with in vivo activity of GSK3B.
81. The method, the antisense oligonucleotide or the use of any one of embodiments 76 to 80, wherein the disease is associated with overexpression of GSK3B gene and/or abnormal levels of GSK3B protein.
82. The method, the antisense oligonucleotide or the use of embodiment 81, wherein the GSK3B is reduced by at least 30%, or at least or at least 40%, or at least 50%, or at least 60%, or at least 70%, or at least 80%, or at least 90%, or at least 95% compared to the expression without the antisense oligonucleotide of embodiment 1 to 59 or the conjugate according to any of embodiments 64 to 70 or the pharmaceutical salt of embodiment 71 or the pharmaceutical composition of embodiment 72.
83. The method, the antisense oligonucleotide or the use of any one of embodiments 76 to 80, wherein the disease is cancer, such as hepatocellular carcinoma (HCC), breast cancer, ovarian cancer, prostate cancer, colon cancer, renal cancer, thyroid cancer, pancreatic cancer or leukemia.
84. The method, the antisense oligonucleotide or the use of any one of embodiments 76 to 80, wherein the disease is an inflammatory disease, such as asthma, arthritis, colitis, and peritonitis
85. The method, the antisense oligonucleotide or the use of any one of embodiments 76 to 80, wherein the disease is a neurological disorder such as Alzheimer's disease, Down syndrome, fragile X syndrome, Huntington's disease Parkinson's disease, spinocerebellar ataxia type 1, stroke or traumatic brain injury.
86. The method, the antisense oligonucleotide or the use of any one of embodiments 76 to 80, wherein the disease is neurological injury, such as traumatic injury to the peripheral nervous system.
87. The method, the antisense oligonucleotide or the use of any one of embodiments 76 to 80, wherein the disease is neuronal degeneration, such as multiple sclerosis.
88. The method, the antisense oligonucleotide or the use of any one of embodiments 76 to 80, wherein the disease is a psychiatric disease, such as bipolar disorder, depression, anxiety or schizophrenia.
89. The method, the antisense oligonucleotide or the use of any one of embodiments 76 to 80, wherein the disease is Type 2 diabetes.
90. The method, the antisense oligonucleotide or the use of any one of embodiments 76 to 89, wherein the subject is a mammal.
91. The method, the antisense oligonucleotide or the use of embodiment 90, wherein the mammal is a human.

### Examples

### Materials and Methods

TABLE 4
list of oligonucleotide motif sequences (indicated by SEQ ID NO),
designs of these, as well as specific oligonucleotide compounds
(indicated by CMP ID NO) designed based on the motif sequence.

| SEQ | | | | CMP | |
|---|---|---|---|---|---|
| ID | | | Oligonucleotide | ID | Start position |
| NO | Motif sequence | Design | Compound | NO | on SEQ ID NO: 1 |
| 6 | TTAGTTATCATAATTCACCC | 3-15-2 | TTAgttatcataattcacCC | 6_1 | 56154 |
| 7 | AGTTATCATAATTCACCC | 4-12-2 | AGTTatcataattcacCC | 7_1 | 56154 |
| 8 | TTATCATAATTCACCC | 4-8-4 | TTATcataattcACCC | 8_1 | 56154 |
| 9 | ATCATAATTCACCC | 4-6-4 | ATCAtaattcACCC | 9_1 | 56154 |
| 10 | TAATGGTCTCTATTCAGTTC | 2-15-3 | TAatggtctctattcagTTC | 10_1 | 184511, 184587, |
| | | | | | 184663, 184739, |
| | | | | | 184815 |
| 11 | CTAATGGTCTCTATTCAGTT | 3-15-2 | CTAatggtctctattcagTT | 11_1 | 184512, 184588, |
| | | | | | 184664, 184740, |
| | | | | | 184816 |
| 12 | AATGGTCTCTATTCAGTT | 4-11-3 | AATGgtctctattcaGTT | 12_1 | 184512, 184588, |
| | | | | | 184664, 184740, |
| | | | | | 184816 |
| 12 | AATGGTCTCTATTCAGTT | 3-11-4 | AATggtctctattcAGTT | 12_2 | 184512, 184588, |
| | | | | | 184664, 184740, |
| | | | | | 184816 |
| 13 | ATGGTCTCTATTCAGT | 3-9-4 | ATGgtctctattCAGT | 13_1 | 184513, 184589, |
| | | | | | 184665, 184741, |
| | | | | | 184817 |
| 13 | ATGGTCTCTATTCAGT | 2-10-4 | ATggtctctattCAGT | 13_2 | 184513, 184589, |
| | | | | | 184665, 184741, |
| | | | | | 184817 |
| 14 | GGTCTCTATTCAGT | 3-8-3 | GGTctctattcAGT | 14_1 | 184513, 184589, |
| | | | | | 184665, 184741, |
| | | | | | 184817 |
| 15 | CTAATGGTCTCTAT | 4-6-4 | CTAAtggtctCTAT | 15_1 | 184518, 184594, |
| | | | | | 184670, 184746, |
| | | | | | 184822 |
| 16 | ATGAAATTGGTTTGTATTTA | 4-12-4 | ATGAaattggtttgtaTTTA | 16_1 | 267802 |
| 17 | TTGGTTTGTATTTA | 4-6-4 | TTGGtttgtaTTTA | 17_1 | 267802 |
| 18 | ATGAAATTGGTTTGTATT | 4-10-4 | ATGAaattggtttgTATT | 18_1 | 267804 |
| 19 | ATGAAATTGGTTTGTA | 4-8-4 | ATGAaattggttTGTA | 19_1 | 267806 |

Motif sequences represent the contiguous sequence of nucleobases present in the oligonucleotide. Designs refer to the gapmer design, F-G-F′, where each number represents the number of consecutive modified nucleosides, e.g2′ modified nucleosides (first number = 5′ flank), followed by the number of DNA nucleosides (second number = gap region), followed by the number of modified nucleosides, e.g2′ modified nucleosides (third number = 3′ flank), optionally preceded by or followed by further repeated regions of DNA and LNA, which are not necessarily part of the contiguous sequence that is complementary to the target nucleic acid.

[0340] Oligonucleotide compounds represent specific designs of a motif sequence. Capital letters represent beta-D-oxy LNA nucleosides, lowercase letters represent DNA nucleosides, all LNA C are 5-methyl cytosine, and 5-methyl DNA cytosines are presented by “e”, all internucleoside linkages are phosphorothioate internucleoside linkages.

### Oligonucleotide Synthesis

[0341] Oligonucleotide synthesis is generally known in the art. Below is a protocol which may be applied. The oligonucleotides of the present invention may have been produced by slightly varying methods in terms of apparatus, support and concentrations used.

[0342] Oligonucleotides are synthesized on uridine universal supports using the phosphoramidite approach on an Oligomaker 48 at 1 μmol scale. At the end of the synthesis, the oligonucleotides are cleaved from the solid support using aqueous ammonia for 5-16 hours at 60° C. The oligonucleotides are purified by reverse phase HPLC (RP-HPLC) or by solid phase extractions and characterized by UPLC, and the molecular mass is further confirmed by ESI-MS.

### Elongation of the Oligonucleotide:

[0343] The coupling of β-cyanoethyl-phosphoramidites (DNA-A(Bz), DNA-G(ibu), DNA-C(Bz), DNA-T, LNA-5-methyl-C(Bz), LNA-A(Bz), LNA-G(dmf), or LNA-T) is performed by using a solution of 0.1 M of the 5′-O-DMT-protected amidite in acetonitrile and DCI (4,5-dicyanoimidazole) in acetonitrile (0.25 M) as activator. For the final cycle a phosphoramidite with desired modifications can be used, e.g. a C6 linker for attaching a conjugate group or a conjugate group as such. Thiolation for introduction of phosphorthioate linkages is carried out by using xanthane hydride (0.01 M in acetonitrile/pyridine 9:1). Phosphordiester linkages can be introduced using 0.02 M iodine in TH/Pyridine/water 7:2:1. The rest of the reagents are the ones typically used for oligonucleotide synthesis.

[0344] For post solid phase synthesis conjugation a commercially available C6 aminolinker phorphoramidite can be used in the last cycle of the solid phase synthesis and after deprotection and cleavage from the solid support the aminolinked deprotected oligonucleotide is isolated. The conjugates are introduced via activation of the functional group using standard synthesis methods.

### Purification by RP-HPLC:

[0345] The crude compounds are purified by preparative RP-HPLC on a Phenomenex Jupiter C18 10p 150×10 mm column. 0.1 M ammonium acetate pH 8 and acetonitrile is used as buffers at a flow rate of 5 mL/min. The collected fractions are lyophilized to give the purified compound typically as a white solid.

### Abbreviations

[0346] DCI: 4,5-Dicyanoimidazole
[0347] DCM: Dichloromethane
[0348] DMF: Dimethylformamide
[0349] DMT: 4,4′-Dimethoxytrityl
[0350] THF: Tetrahydrofurane
[0351] Bz: Benzoyl
[0352] Ibu: Isobutyryl
[0353] RP-HPLC: Reverse phase high performance liquid chromatography

### Tₘ Assay:

[0354] Oligonucleotide and RNA target (phosphate linked, PO) duplexes are diluted to 3 mM in 500 ml RNase-free water and mixed with 500 ml 2×Tₘ-buffer (200 mM NaCl, 0.2 mM EDTA, 20 mM Naphosphate, pH 7.0). The solution is heated to 95° C. for 3 min and then allowed to anneal in room temperature for 30 min. The duplex melting temperatures (Tₘ) is measured on a Lambda 40 UV/VIS Spectrophotometer equipped with a Peltier temperature programmer PTP6 using PE Templab software (Perkin Elmer). The temperature is ramped up from 20° C. to 95° C. and then down to 25° C., recording absorption at 260 nm. First derivative and the local maximums of both the melting and annealing are used to assess the duplex Tₘ.

### Example 1: Testing In Vitro Efficacy and Potency

[0355] Oligonucleotides targeting one region as well as oligonucleotides targeting at least three independent regions on GSK3B were tested in an in vitro experiment in HeLa cells. EC50 (potency) and max kd (efficacy) was assessed for the oligonucleotides.

### Cell Lines

[0356] The HeLa cell line was purchased from European Collection of Authenticated Cell Cultures (ECACC) and maintained as recommended by the supplier in a humidified incubator at 37° C. with 5% CO₂. For assays, 2,500 cells/well were seeded in a 96 multi well plate in Eagle's Minimum Essential Medium (Sigma, M4655) with 10% fetal bovine serum (FBS) as recommended by the supplier.

### Oligonucleotide Potency and Efficacy

[0357] Cells were incubated for 24 hours before addition of oligonucleotides. The oligonucleotides were dissolved in PBS and added to the cells at final concentrations of oligonucleotides was of 0.01, 0.031, 0.1, 0.31, 1, 3.21, 10, and 32.1 μM, the final culture volume was 100 μl/well. The cells were harvested 3 days after addition of oligonucleotide compounds and total RNA was extracted using the PureLink Pro 96 RNA Purification kit (Thermo Fisher Scientific), according to the manufacturer's instructions. Target transcript levels were quantified using FAM labeled TaqMan assays from Thermo Fisher Scientific in a multiplex reaction with a VIC labelled GAPDH control probe in a technical duplex and biological triplex set up. TaqMan primer assays for the target transcript of interest GSK3B (Hs01047718_ml) and a house keeping gene GAPDH (4326317E VIC®/MGB probe). EC50 and efficacy of the oligonucleotides are shown in Table 5 as % of control sample.

[0358] EC50 calculations were performed in GraphPad Prism6. The maximum GSK31B knock down level is shown in Table 5 as % of control.

TABLE 5
EC50 and maximal knock down (Max Kd) % of control

| CMP | | | | | Start position(s) |
|---|---|---|---|---|---|
| ID NO | EC50 | Std | Max kd | std | on SEQ ID NO: 1 |
| 6_1 | 4.12 | 1.89 | 49.93 | 7.73 | 56154 |
| 7_1 | 3.88 | 3.88 | 6.34 | 5.52 | 56154 |
| 8_1 | 9.20 | 9.20 | 52.76 | 4.28 | 56154 |
| 9_1 | 9.47 | 9.47 | 89.90 | 5.23 | 56154 |
| 10_1 | 1.68 | 1.68 | 6.92 | 6.32 | 184511, 184587, 184663, |
| | | | | | 184739, 184815 |
| 11_1 | 4.88 | 4.88 | 00 | 16.28 | 184512, 184588, 184664, |
| | | | | | 184740, 184816 |
| 12_1 | 1.77 | 1.77 | 9.28 | 2.77 | 184512, 184588, 184664, |
| | | | | | 184740, 184816 |
| 12_2 | 0.69 | 0.69 | 2.80 | 0.96 | 184512, 184588, 184664, |
| | | | | | 184740, 184816 |
| 13_1 | 4.68 | 4.68 | 30.34 | 16.64 | 184513, 184589, 184665, |
| | | | | | 184741, 184817 |
| 13_2 | 1.42 | 1.42 | 0.00 | 8.74 | 184513, 184589, 184665, |
| | | | | | 184741, 184817 |
| 14_1 | 1.03 | 1.03 | 0.00 | 4.53 | 184513, 184589, 184665, |
| | | | | | 184741, 184817 |
| 15_1 | 10.14 | 10.14 | 0.00 | 12.39 | 184518, 184594, 184670, |
| | | | | | 184746, 184822 |
| 16_1 | 1.84 | 1.84 | 58.98 | 3.89 | 267802 |
| 17_1 | 71.15 | 71.15 | 0.00 | 129.72 | 267802 |
| 18_1 | 1.34 | 1.34 | 56.72 | 1.83 | 267804 |
| 19_1 | 4.65 | 4.65 | 58.44 | 12.45 | 267806 |

The application's sequence listing, which the Patent Office published only in electronic form, follows.

SEQUENCE LISTING (20 sequences)

SEQ ID NO: 1 - DNA, 273095 bp, homo sapiens
cgggcttgtgccgccgccgccgccgccgccgcccgggccaagtgacaaaggaaggaaggaagcgaggaggagccggccccgcagccgctgacagggctctgggctggggcaaagcgcggacacttcctgagcgggcaccgagcagagccgaggggcgggagggcggccgagctgttgccgcggacgggggagggggccccgagggacggaagcggttgccgggttcccatgtccccggcgaatggggaacagtcgaggagccgctgcctggggtctgaagggagctgcctccgccaccgccatggccgctggatccagccgccgcctgcagctgctcctggcgcaatgaggagaggagccgccgccaccgccaccgcccgcctctgactgactcgcgactccgccgccctctagttcgccgggcccctgccgtcagcccgccggatcccgcggcttgccggagctgcagcgtttcccgtcgcatctccgagccaccccctccctccctctccctccctcctacccatccccctttctcttcaagcgtgagactcgtgatccttccgccgcttcccttcttcattgactcggaaaaaaaatccccgaggaaaatataatattcgaagtactcattttcaatcaagtatttgcccccgtttcacgtgatacatatttttttaggatttgccctctcttttctctcctcccaggaaagggaggggaaagaattgtattttttcccaagtcctaaatcatctatatgttaaatatccgtgccgatctgtcttgaaggagaaatatatcgcttgttttgttttttatagtatacaaaaggagtgaaaagccaagaggacgaagtctttttctttttcttctgtgggagaacttaatgctgcatttatcgttaacctaacaccccaacataaagacaaaaggaagaaaaggaggaaggaaggaaaaggtgattcgcgaagagagtgatcatgtcagggcggcccagaaccacctcctttgcggagagctgcaagccggtgcagcagccttcagcttttggcagcatgaaagttagcagtgagtattggttttattttacaccccttttccacctcgcccttaaaataagaaacctcgaaataccaggatctgaaattattagacctcctgataaacaggcaatggaaaagggcaaaacctatcttcagtcaaggatgaagcagctccctttttactcctcccataccccctcccccggtctcattaaccttgaattgagataatatgatatttatttggatgattcgatttcaaactgctttcttgtacttttcttgctgttggtagtcagtttcatcaagtgctcgagtgtttccacgttaaagtagtgatgacagtgtttacttgcccatcctttagaataaagagaaggacaagatttgattactaaaccattatgcacatttgcagaatttttggaatttggaatgagagaatattttaggtctcaggggttatcatagtttgatatacttaatagagacgttaaatgtcccaccctcccaacatttttttcttgtttgtatgactacacataatatttgttcttaatctgtggatgaacttcctcagtaaccattcacatttggaggctgccattgatttctctctttagaagggactagtgggagccaataaatacctagcagcagtaacatctctgtatgcatttgtgttcaattggataagtggtttgatgtgttatctcttaaccttcctgttttgacattaccaacctgccaccgtataatttatgtttaatcaaaagttaacttggaagtattaataggtccaagttttgattgagatttgttttgtcatagtgccaaatactaagttaaatgttgtcactggctcattacatttaagttcaattttggagtgctactgcattcattacctgttaaatgttctggcgggttccttaaaaaggacgatttaaaacactctagcgttagtttccatcatatttagataactgtggatttagttagaagaatgtggatttagtcctttccattttggcttttgcagatggctatggtcctagaaataatagggatatttgggctgtgttcagggttgtggatagactactcttgtcctgggtttgtgctgaaaagtatgctcttgaagtgtttaatatatactaagtatctaatgttccagtgtatctctatttatggagaagttcatgtggtatttaatgatagcttgtttaaacatacttgcagaatttaacaaaaatatctatattgtttccttattgtgggaaagaggggcatcatgagggcaaagacaaattaatttgttgcctagaagaactgagagaactaaagaactgagattttaagaacccacacacacgcaaaacatgatgttatgtgaaattgattatattcttaggcaacataaaatgatcacttttagttgaactcaagatttcaattcatgttggctttgggaactagcctgaaacagggtagtctaggtaatagctgaatgggagataatttttgaaagttaattttttttttttcttgtggcttgcaagtagagaatgcccgggtaggtaaagaggaaagctgattatgcatctttcagggaagggtcgtgctttctaagcacttcatggagtgatttgaaaaatattttaaaattccggggtaattttcagctatgatgatacaaatcttataatagctacttaagagcctcttgtggtactggagtgtttgtatgttttacatcttggtaatatagtttgaaaatcagtcagtctatttcagctaattgatttattagctttatttcagagatctgtaatgctagattataatgctacattttgggacttttcattttcttttcaggattttctttgaaaatgactcttgaattcttggtaatacagatactaactaaggatggagtaactcttgtaaaatatatagatgaaaatgtttaattccgattaccatataggtcaatttagaattttaaaagttggagtttagtgttaattatgtgtttttgacagctttgactttaaaagcatttaaaagaaaggggagtctttaagcatttgttaggatgctagcattctaaggaacccctgttgaaaacagacataagaaattgtagtccttgctctcaaaagcttatcctttagttgtagagggaggctatggggaaaaaaaaattaaaacaatagcgtgatgactgcaagattgtaaaatacaaattgaatcatttgttcagagtggcaaagagtaaaggggtgagactgatggttgggagaggaaagacttcctgcggacaaggtgtattaggactgatgttaaaggaggtggtaacttgaactggtagaaaagcatgaaaggtctaggtggaaggagtgtaccaaggaacaatgatggtgagttttgcatgagagacaataatcaagttgacaaatctgaattaaaggggcctaaataagaacataagaacagatggaatttgagaaataagagaaagttagctgatggagggcagaggggttctgtacaagtttgattgagattcagaagagatctggatttattgttggttgctgaataagacgtaagatgatttttgcagttgaattagtgaattatagtagagagatgctagagcctttttagggagctagtagggtatgttgtgaatcatgagggaataaagtaaaatgtgaaagtggggtgaaaggaacaggtttgagagacagtgtgaatgaagaactggcagaacttcatactggactgaagtggaatatttgtgaaggagtcaagagttaaaaataaattctgatgttactggcctggaagacttgactgctaagttatattgttaattgtaatgggaaaattgagaaagtgctgaggtgagagggtaggtgagttcactttcttaaaatttaatatacaataagttcccttgaaattcagacagcagttagttactggcaatgatatttgacttcctagtctattaattgcacagtttctaatttttctacacctaaagatgttggatttatattcgggagcagtaaactaagggcttttatttaaatgcttctcatcaaagtcctaattttttttttttttatatacagcttcaaaagcctcacacttgaaacctggttataatagtttcatgatggcttatttcagatcaatgaaaatacttttgggactaaactgtgactgtaacattttagatatgtagccattaatctttgatatatgcttaaaacttgttttttataaataatgattattactattattttaaatgcaaaatttatctaagaataaagtattgagagccttcactttgtgaagactccagaagaaattaaaagttgattttataacaagtattttttgccctttttgttgagtttaggcattaatcccaaatttaaatcagtatatttgaaatactactttttacttgctatagtgaaaccaatgtttcatttttgttcacttccaagtttacatgtaattaaataaatgtttataaagtttttctttagaatcacatgatattttactccatagggaaagtaagggactgtttgtggcacttttggttaaaatattagtaatccttttggtatatacaattggagaaaatttagctagttgtttaggtttaatacttaaatataagatttagaaatatgaaaataagtctgtatcacttaagttgtttcctcatataaaacttttttagatcaaaatttctattagcaaagagagaataatagtagctgcatattattctgcagtattacgtcgtatggtgattaaagccaaagagtaggtagcaacttagagtttccgtattcccctgggaagtttaatctctttatgacatctaaaaattaggttattagagtttagtccatttcttgataatcctgtgttaatgtggaaaagagttcatgtgtgagactgaaaaccagaactttattttcagtcatttcccaacccgacttccccagagttgttaaaacgtttaagatatttaagaattgcatgctttcttgttgcatgcacctgtagaatgctaattgtgaagtgacagtaagtcacaggcaaaaggaaaaacttcaagggaacccagtgattcacaaatcaccttatggctgattgggaactgcatttagaaaatgaggtgacatcttctcatttcactggcaaagttcagctgaaaatcagtacttgcacgctttactgtgtagcccttatattagaattgagttgcaggtgtgagataatattttggagaaacagcaaggctgggaaagtcagagattttattccagcagcagagtctaaagagtgggagagctctatttgtgtgtgcactttatgcatagagaaggctgtgaaacatgcatatgttgaccctattgtcacagttccatacttttaaataagacccatgaagttgagacagggttggagatgacagacaggatgtgagattgtggtgcttcttgtgatgctccaccctataatggagaatggaggggcagaacgcttgtgtgggtgagacaagagtgtgtgttggtactaacaggaccaaccgggttccccggatattgttcttctaagaacataatcaccataagtaaattaatttgttggaatgtttatcattttctagctgattttttgtgtgtgtgtgtggggtggtggtggtggaaggggagttttccccgatttcaagaataaaagcattttcattgttcagaagaagagcattttcattaaagcggaggttgcactcttggcattttatcttgagttatacaaatcatccttggttatacaaatcaaattgcttttgaaatttgttgagtgtaatgtataaatgtatatttatataaaaacctatgtgaatagaacagcaaggaaaaactgagtagagttaaagaagtttgttttccctgagattttctgcctttaaatttatataaaaaaggaatattccattttacgttattgagttttctatttttttaaatgagctaatactcagtacataatggacatttttagtaaattattccaatatacttgtgtctgtaatgcatttgatgtggtataagatttagaaacacaatttagttcggctggcacggtggctcacgcctgtaatcccagcactttgggaggccgaggcgggtggatcacgaggtcaggagatcaagaccatcctggccaacgtggggaaaccccgtctctactaaaaatacaaaaattagcgggggcgtggtggtgtgcgtctgtagtcccagctactcaggaggctgaggcaggagaatcgtttgaacccatgaggcggagattgcagtgagctgagatcgtgccactgcactccagcctgggcgacagagagagactctgtctcaaaaaaaaaacaaaacaaaagacaatttagtcgatttgggttcttagtttataatcccccttaccatttttgcttatattttgggaagagaggtcaacttccaaacaatgtgcaggttccaattttataagtgattaaatcttatattttttgtattgaatagttttcttagcatgtttggtttgatcacttgaagtaatgatgtatttgtcttgaaactagttttgtcaaaccaactttttatttccagagtaccatggttaacaacagcacaaagccaagtccttaacgtgttcccttaataacatggtctaaggttaatttcttgattcttatttcaaatcaattcagtaataaaaagtacactttttttttttttgagatggagtctcgcactgtttcctgggctggagtgccatggcgtgatctgggcttactgcaacctctgccacccaggttcaagcgattttcctgcctcagcctcccaagtagttgggattacaggtgcctgccaccacacctggctaattttttgtatttttagtagagacggagtttcactgtgttggccaggctggtctcaaaatcctgaccttgtgatcttcccacctcggcctcccaaagtgctgggattacaggcgtgaaccaccacatgtggccgaactaaattgtgtttctaatttagttttcctgaagaataacagctatgcatcaatgtggaattgtgttatttggaatctcaccttattggaattggctggtaattgacagtaaaccagaagtgctcctgagcagctaatatctgcagacaaatggagtgtaaactttgctcataggttagttttcaggcttttattaacggttccttgttattatttaacatatagttgtaattcattgagttgtctgggtttttttgaaatcacagatcaggggaatggataggtactgattaagcattatgctactgaaaagaatggatgattaggggaaacaagcatattgggattacttagtgtatgtagggtatgtaggttcatatagttccagggtaaatcattctgataattgttgaaaatgttcacccagagaaatttttttttttttttggagacagggtctcgctgtgttgcctatgcctagcctggagtgcagtggcacagtcttggctcactgcagcctctgcctcctgggctcgggtgatcttttaacctcaacctctggagtaactgggactataggcatgcgccaacatgcctggctagtttttgtagtttttatagagagggggtttcgccatcttgcccaggctggtcttgaactcctggaatcaagcaatcctgcctcagcctcccacagtgctgggattacagtcatgagccactgcacccatctgagaatattaattctcttttaaagaggcaggaggcagaaaaatctcttgtggaaacctgggcttctgcataaactacataaaatatctgtaatttgttgatcactgaagtgatgaagagaactgggtcacctctgtctgattcaccatcttctagttggatttcagcagtatggataaaggtactaaagtctttagtgtgctagcccagggtattgtttccaactctttcttccattgtccatctacatttattaactcagcagcagagttttatctgatttaagatttgttgtcttactatttctgtttttttttttttcctccttagtatatatggaattgctgcttggattttggctggcttgtaccttttgtttgtggactgcttagaaggcactgcatggagtcatttaagctttcttatgaattatgaatagctatgtagagaggaacttttctagatacatttatggcctatgagaattgaaaagctgggtatcttaattgttaggctgaagaaaaagggtgatagtggcaaagtagtttttcttttggaggtctgagaaattcttaggggcttaattggctaatataactagaaaggttgggtgatttaggtttttttccaaggaaaggtatcttatttaaatgcaacactgtctgcttcctgttattttataaaattagttaatacttttttttttttctcaagacggaatgtcactgtgtcgcccaggctggggtgcagtggcacaatcttggctcactgcaaccgccacctcgaggcctggttcaaggaattcccctgcctcagcctcctgagtagctgggattacaggcatatgccaccattccccgctaatttttttgtatttgtagtagagatggggtttcaccatgttggccagactagtcctgaactcctgacctcaggcaatctgctggcctcagcctcgcaaagtacagcaaaatcagttaatatttttaattgattaacactttcttcatgacctgtgttgaagttattgagttgagtcaattgaatttctaatgctagattttgagtatgtggtgtgagcacctgaagagttggaggtactggaattatgtctgacatcagactgatagtatttgcagggacatttgccctagtggaattcagggttttcacattctatacattacttaaattatgaaggaaagggggaagctttgagttggtagacttttaataataagatataattacatgtatatagaagagcaacgtactgtatatcatattctcataatatatggtaataacggcagtaattattgagtgcggtgtgccagataattgcatgttttatttacctattttgctttaaattttaaaaaatgtaatttactcacatggttcaaaattttaaagatattcagtgaagtcttctctcctgctctgcaacaaccagttctctttcctggagaccactggcattacaatttcttatgtgtcctttcataggtattctgaatctttacggattaatgatttctatagtagacttgcattttgtgtatacatacataaattaacaatagctttagcagaagtgttagaattaaaacaaatttaaatcagtaactctagaaaattgctattttttaacctattaaattagtaaatacttatttctctaaatataagttagttggagaataagtgcaaagatgacagagctcctctcgtggcaattagaggtaaaatgttaatagtcttaaccaatgaacaattaatagcacatttaaaatagatgtttatttcataataaaaagacaggataattttttaactttctatttttctaacatcttagatgagaaaacctgttctcttgagagatcagaggcgcagagtgcgtcagtgtcaatgaagcctgtgccttttacttctttaagagcgtacggtttcattctgctcctaaatcaagcaccccttagttgttgaataaaaattacttttataaaggaatatatgatttaaagaaatcaaatagtgcagaagggcttatgatggaaagtaatcttctgtcctccagtcctacttcttagaagcaacattggctatgacagctgtttcctctagtagtttttgtcatatttttaattatatgctttttatctatttcttaaaattaatttttttgtcttattgtggtagacatcatttattgtcatgcccatctcccttttgctttcatactgatataattatgccactatttaaaaactattatttatttaaattattattcaaattattctcagtatgtagacatggaacagtattctatgtagaaacaagtagtatacagtgatcacatttccttatgagaatagctttattgagatataattcacataccgtaacattcattttttcattactcaggtgttcatagacttgtgtaaccatcccaaccatctaattttagagcacttttatcatttcagagataaagcttatacccattagcagccattccctatgttccccttccccacagctctaggcaaccactaatttactctctgtctttatagatttgcctgttctggacatttcatataaatggatttatgtaatacatggccatttatgactgttttctttctcccatgttatagcatgtattagtacttcattcctttttattgctgaataacatttcattgtatggaaatcctgcgatttgtttattagttgatggacatttgggttgtttctgctttttgactagtatgaatatgctgctgtgaacatttgtgtgcaagtttttgtgtggacatatgttttcagatcttttggggtatatacctaagtagtggaatggctgggtgatatggtaactctctgtttaaagtgttaaggagctattaagctgtttcaaagtgacagtcacattttttcctttgcttttaatctttttagactttattgttgccattttctttctttttttttaaatactgtttgtaataattataatctcaattcttccccccaaatgtaccaatttatcagacattctctggatttctacctgcctcctgcccctttcttttcctggagtgtcctttttcctggagccctcgtccaactgctgggatctgatctagttgttctccaggccccgttgtacagctgtcatcctctgacttctttcgctgctcttcagggttggctctccagtttcctggatcccatatctctaaataacatttcattgtatggaaatcccatgatttgtttgttagttgaatagttcttatctgataactgtttgataaatatacctggaaaagttgttcattgtttttttccatatttgttccaaaagggcagttaagaagctatatactttttgggcagataccctcacccttgcagtatctagatactgagaaatagatgttggaaggttactttgtatcattttattaagtgattaccatgcaaacataaggcaagtacaaaaatctgaaaaatattaatattaagtaattgtttagactagagctattcagaagaaatattatataagccaaaaaggtgaattatatatgtaattttaattttctatgaaccactttgaaaaatagacacaagtgaaattaattctagtaatatattttatttaacctagtgtatctaaactaataatatatcaagatgtaatcaatataaaaattattgagatattttacattctttttttgggtagtaaatctttataacctagtgagtgttttacacttaaagaacatactaatttgggggccgggcgcggtggctcatgcctgtaatcccagcacattgggagaccgaggcgggtggatcacgaggtcaggagttcaagaccaacctggccaagatggtgaaaccccgtctctactaaaaatacgaaaattagctgggcgtggtggcagacgcctataatcccagctacttgggaggctgaggcagagaattgcttgaacctgggaggcagaggttgcagtgagccgagattgtgccactgcactccagcctgggtgacacagcaagactctttctcaaaaaaaaaaaaaaaaaaaaaaaaaaaaagaacatactaatttgggctagccacatttcaagggttcattagctacatgttgctagtggttattgtattggacagtgcaggcttagaattttgtccaggaattatattatttttgttatttttaagtaatagaaaaggtgtgtgtggtttaaaaacacttcattgatttatgcctttgtttttaatcatgttttcagcttattttgagatttaaaagaggttgaaaattgttacgtttttcagaagggggcttgctgtagggtgggtagtgattctttccacccttattttagtaaaactgttaaaataggtatttaaatttttgctgttaagataattaggtgttgtccttaccatgattgccttggcctccgtggaattttttcgatgcaaatattctttgtcatatattatttccccttgctgtttcaaagaccttagctggctttcagtctcaaatgccacctctttagtcattcatgcttatctcaaggcatgaaattcactttcatataactccttcagcactctctgtgacccttctaatgttcttccttgtattcttgttaatgtgtcttgtttctccgtaggagatcataagttccaacatgacataaaaatattttatgcatctttgtattttctgcagtgtggagcacagtcctttttgtattgggtcacttagtacatattctagttgaaggcagtttgtcatgtgatatggtgtctagtggtatgatagtttacaggtcaccaagctattgctgatgtttctaggaacatttaagttttgatgtaagaaattaagttaaatttgtgttttgtttgtttgtttttttgagatggagtctcgctctgttgccaggctggagtgcagtggcgcgatcttggctcactgcaacctccacctcctgggttcaagcgattctcctgcctcagcctccccagtagctgggactacaggcatgcaccaccacgcccagctagtttttgtatttttagtagagacagggtttcaccatgttgaccaggatggtctctatctcctgatcttgtgatccgcccgcctcccaaagtgttgggattacaggtgtgagccaccgtgcccgaccctgttttttttttttttcttaaatgtgaaggaatgatagtagggaaaggaaagagacatagagtatacagacacttctgttgcactgtgtgcttagcactgagtggctctgaaatctttggatggatgactgaaagaaaggacttgggtgctaggttgcactggttggtaagcacagtacctttgaaacattgagcatatgacgctactacggtatccccttacattattttatttggagtgggtaaggactgaagagagatttataacagtgaaacctgacagttcaatttctttcctttcaccaagtagcttactctgcaaaagaataaagtaaacagacagtatttaaatatgagaagtcttttcatcatggatgtacttaggtatgtaattgtattgtgggggagttgtgaaactgtaattttttttctttttttttttgagactgagtcttgctgtattgcccaggatggagtgcagtggcgtgatttggctcactgcaatctctgcctcccaggttcaagcaattctcatgcttcagcctcccgagtagctgggattataggtatccaccaccacgcctggctaatttttgtatttttagtagaagcagggtttcataatgctggccaggctggtctcaaactcctgtcctcaaatgatctggatgctttggcctcccaaggtgctgggattacaggcatgagccactgcacctggccgaaactaatttttacaagacctctttttgggtctttaagatgatgtttgtttgtttgatatgttagtatgtcagttctagagctttcccagagagggtgagaaatattaataaacaatagggtttctattgctaaataatacaacttcttttttttttaattagaggaaagagtgtcgtcgtcttctccttcttccttctaccttcttccttcttccttcgtcttccttcttccctccccctcctcccaccttttttggagacagaatcttgctctgtttatcagattgtagtacagtggtgtgatcttggctcactgcagcctcaacctcctgggctcaagcaatcctcccacctcagcatccacattagttgggtccacaggagtgcgctaccatgcctggctcatttttgtattttttgtagagacgagattttgctatattacccaggctggtctcgaattcctgagctcagtccagccaccttggtctctcaaagtgctgggattgcaggtgtgtgccacctcacctggccataatacaaattcttaaatagtggtcgaatatgactttctgtatttggttttgaaaaataaattgctttccacatatcagcatggtatttccttctgtgattaaatgtgtgcattgtgagatgtttggctggtatagggtacaattcttagacatggaagaaatttactttctctgtaagtagcaaatacttgttatgcccttcttgaaccaagaggatttactaaagaacaaggtataattctatttaaattcagttgaacatcaggaataacttttactgagagactctgaggcctttaaaaaatatgtttatataggccgggtgcggtggctcactcctgtaatcccagtactttggaaggttgagatgggtggatcacttgaggtcaggagttggagaccagcctgagcagcatggtgaaacctcatatctactaaaaatacaaaaattagccgggtacggtggcaggtgcctgtaattctagctactagggaggctaaggcaggagaatcgtttggacctgggaagtggaggttgcaatgagccgatactgcactactgcgctccagcctgggcaagagagcaagactgtctcaaaaagaaaaaaatgtttaatatgtatctacttgtggcagtagtctacttattaaaaaaaaaaatgtgtgtgtgtgtgtgtgtgtgtgtgtgtgtgtgtgtgtgtgtgtaatttcctgtcaaggttgtagaaaattaaaggagagttgtgctttttcaaaggatagaggagacaggccaggtgcagtggctcatgtctgtaatccctcccagagggagactgaggaggggcggatcgctgaggtcaggagttcgagaccaccctggccaacatggtgaaaccctgtctctaccaaaaatacaaaaattagctgggcatggtggtgcatgcttgtaatcccagctacacgggaggctgaggcaggagaatcgtttgaacctggcaaagcagaggttgcagtgagctgataccgtgccactgtactccagcctgggcgagacagcgagactgtctcaaaaagaaaaaaaagtgtgtgtgtgtgtgtgtgtgtgtgtgtgtgtaatttcctgtcaaattgtagaaaattaaagaagagctgtgctttttgaaaggatagaggagacaggccaggtgcggtggctcacgtctgtaatccctcccagagggaggctgaggctggcagatccctgaggtcaggagtttgagaccaccctggctaacatggagaaaccctgtctctactaaaaatacaaaaattagctgggcatggtggtgcacgcttgtaatcccagctacacgggaggctgaggcagaagaatcgcttgaaccccagaggcagaggttgtagtgagccgagatcgtgccacttgctctccagcctgggaaacagcaagactccatctcagaaaaaaaagaaaaaaaaaaaaaaagaggagaagttctagtatgatatttctgatatttctgctctacattggagaaggagaacttagttagaaacaaagggtgtgtttgtcgtatttgtcatgacttccaaaatgggagcaggtgggccaattcctgggtcgttagaaaagaagacccagagacaggagattgtcttccggcactgtgtgggctatggtatcaatataagttgtatagcttgttggctttcagtatttatttaggagtaggaaattgttctaaaatgcatttcacattatatctaattaaaaacacatctttttttgtgttaatttcttacatatagctgagaaagcctagactttctaaagtctaggaaagaggtgagaaatgctgctgtggaccataggagttggggtgggggaagaagctaattagaaaaaagtttgtggtcatgatagattttgagtttctctggatgctgttaatgatggccggaattttagaattcagattcagctactctttgaatgtttattgtgtgccaagcactctcattccatttaactttcataatgctctgtgacaatatttgccccatttaatgagtgaagaatctgaggttaaaaaaaatatatttttttaattgatttattccggggccttacagttagtagggaataggttccagatgttgatcccaggccctccagacttgaagtaaaggaagaaaattttttgagtacttaccatgtcattgtacaatagtaagcaattaatttaaaataaatgttactatgtatatttaagatatacaacatgatgttaatatgatacatattataataaaatggctactgtagtaaaagaaattaacatctccatctcacatagttacccaccccctctccctcgcccctaccaagagcaactgtaatctactcaactcttaacaaaagcctagatacaatacactattattaactatagtcttcatgttgtacattagatcttttgacatgtttatcccaggtatttgctacttcctatactttgacctacatctccccatttcctcccctgctcaacctctgctaaccagtttactctctatctctgtatatttgacctttttttgaaaaaagatttcacatataattgagatcatgatatatatttttttctgtgtatagtttatttcagttaatgtccttcaggtccatccatatgtgtgtgtacacacacacatatatatatacacacactgaagtttaaccattcgtccattgatggacacctagggttgtttccatatgttggctgttgtgaataatgctgtagtgaacgtgggaatgcagatatctttacgaagtgatgatttcataatattttgtatatacccaaagaataattactgggtcatatgatagttctatttttagtttctttagaaacctccatactgtttccagagtggctgcactaatctgcattctcaccaacagtgtacagaggttctcttttctctacacctctaccaacacttaatctcttattttttatttttatttttttgataatagatatcctaacaggggtgaggtggtatctcatcatggttttgatttccatttctctgatgataagtgatgttgagcaccttttcatatacctgttggccgttttttaggtcacctttagggaaatgtctattcacctcctttgcccattttttttttttttttttttttttttgagacggagtttcgctctgtcgcccaggctggagtgcagtggcgcgatctcgactcactgcaagctccgcctcccgggttcacgccattctcctgcctcagcctcccgtgtagctgggactacaggcgtgcgccaccatgcccggctaatttttgtatttttagtagagacggggtttcaccgtgttagccaggatggtctcgatctcctgacctcgtgatccgcccgtctcggcctcccaaagtgctgggattacaggcgtgagccaccgcgcccagccgcccatttttaaatagagttatatgttttcttgctgttgagttgtatgatgtttttataaatcttgaatattaaccccttatcagatatatggtttgccaaaatgttttcccagtctgtaggttgtctttttattttgttgtttcctttgctgtgcagaagctttttagtttgatgtagtctcatctatttttacatttgtttcctgtgttttggtgtcatggaaaaagtcattgccaagaccaatgtcaaggagatttctccctatgttttcttctaggaattttgtggcttcaagtcttatgtttaggtttttatccattttgagttggtttttgtgtctggtgtaagatgaggattcagtttcattattttgcatgtggaaatccatttttcccaacaccatttattgaagaattgtgttgtcttggtgcctttgttgaaacatagttgacggtctatgtttggatttgttgctgggctctctattctgttgcactggtctgtgtgtctgtttttatggcagtactaaactattttgattatagttgctttgtaatttaattttaactcaggaagcgtgaagcccccaacttttttttttcctcagaattgccttggctgttcagagtctggtggttccatgtgaattttaggattgctttttctactcttgtgaagaatgccattgggattttgataggaattgcgttgaatctgttttgttgctttgggtagtatgataattttaacaatattcttttgatccatgagcatggaattctttccatttatttgtgtcctcttcattttctttcatcagtagttttagttttcagtgtacaggtctttcaactttttggttaaatttattcctaagtattttgtttgttgatactaacacaaatggggctgttttcttaatttctttttcagcttggtcattatttgtgtatggaaatgccatgaattttttatgttgattttatatcctacaactttactaaattaatttattcaatctaacagtttttcatgtggtctttggagttttctatatatgggatcatgccatctgcaaatagagataattttctgatttggttaactttttttttcctttttcttgtctaaatactcttgatttagacaagctcttccagcacttctagtattctgttgaatagaagtggtcagagtgggcatctttgccttgtatcaggtcttagaggaaaagttctcagtttctcgccattgattatgtagttagctgtgggtttttcatagatggccttattatactgaggaacttgccttctatatttaaactgttaaagagtttttatcaagaaagtttaactttgttgaatgctttttctgtcagttgatatgattgtgtcatttttctttcagtctcttaatatatcacattgattcatttgtgtatgttaaaccagctttggatgcccatataaatcccacttgatcatgatgtgtaattttttgatatgttgaatttgacttgctaatactttattgaggatttttgtatcatcagtgttcatcagagatactggcctgtagttttattttcttgtaatgtttttgtctagcttaggtatcaaggtgatgctggccttatcaaatgtgttacagctctattatttggaagagtttaagtagtattggtattcttaaaaagtttggtagaattaagctgtgaagctgtctggtcctgaccttttcttttttgggaggattttaattaccactggttcaatctttttgtttgttatgggtctatttaggttttctattttttttctgattcaaccttggcaggttgtacttttttaggtattcttttcttctaagttatcacatttgttggcatgtaattgttcgtaacagtttctcagcgctgggtgtggtggctcacacctgtaatcccagcactttgggaggctgagacgggcagatcatgaggtcaggagttcgagaccagcctgaccaaaattagccgggtgtggtggtgcgcacctgtaatcccagccactcaggaggctgaggcaggagaatcgcttgaacccgggaggtggaagttgcagtaagccaagatcgtgccactgcactccagcctgggtgacagagtggaactctgtctcaaaaaaaaaaaaaaaaagtttctcatgacccttcttatttcttttctttctttctttctttttttttttagagacagggcctcactctgtgacccaagctgcactgcggtggtgcgatgtacattcactgcagtctcaattcctgggctccagtgatcctcccacctcagcctcctgagtggtactgcagatatgtgctacaacgcccagctaatttttgtattttttgtagagagagtgtttcaccatgttgcccaagctggtcttgaactcctagactcaagtgatctatccacctcggcctcccatagtgctgggattacagtcgtgagcagcggcacctggccaactgtttttatttctgaggcttctattgtaatgtctccactttcatttctcattttgtgtattttggactcctctctttttgtgtagtctaagggtttgttgattttatttttttaaaaaaccaactctttgttttattgtttttctccatgggttgtctattctctattttaagcaacttgtttgtatcttatttaattttcatcacagtcttctaaggcaaattgaatttataaatgaggaaactgacgcttacagagccttacacagccagcaagatgcatagccatacttcgaacctgttctcttaattgctccactgtatggcctttataatttggagagggaataagataattgcccgaaattggaagaattaaggttttttagggtacggcttaggaacttctactttttgtagtgttacttatggaggagaaagtaattgtcagtcatatataagtacagtttattttattttaaaataaaaattttaagagcaaataccttgcttttaaaactgatctggctagctataaaacagtggctgtgagagatgggtaagaagtgtagttgaaatccatattgcaaaatcagttttgagcctgagctcctatccttttcttttcttctttgagatggggtcttgctctcttgcccaggctgaagtgctgtggtgtggttgtggctcactgcagcctacctcctgggctcaggtgatactcttgcatcagcctttcaattagctaggactacaggcccgcaccaccatgccaggctttttttttttttttttttttttaattttttttgtagagatgaggtctccctatgttgtccaggctgggcttaagcaattcttctgccttgtcctctcagagtgcagggattatagatgtgagccacagagctcagtcaggatcactttaacagatgaaactgaatcttagagaagttaagtaactcttgccaaggtttcatagccagcaggtggcagagcctggattccaacccaggtaatttagtctagagctcttattcttaactactttactgtcctaagagtatgcgaatgtacagaaatggagccttgctacctctggtaacttgaaggcaccaattttgcgttcagttaacatatcatagtttgatccaaggcaagaacagaagtgttaacacttcacctgcctctgtccttattatttcccatggttattggtctcaataatttttgttgttgttttatattattcttgcactggaaaatcctttgtacttagttgtcatttaataaatgatgaatgttgaaaaataagccagaaattgaaaactttgaatcttaaatatagagaccaaattgtaatacatagttgattgtcatgtttttctttttaagaagttatttttatagtgtttgaagataattattattattatttttttgagactgagtcttgctcaggctgaagtgcagtggcatgatctcggctcatggcaacctctgcctctcaggttcaagcgattctcctgcctcagcctctcgagtagttgggattacaggcacgtaccaccatgccctgccaatttttgtgtttttggtagagactggttgttctctaccatggcgaactaccatggtgttcgctgtgttggccagagtggccttgaactcctgacttcaagtgatcctcctgcctcagcctcccaaggtgctgggattacaggcgtaagctaccgtgcccggccgaagataattaaatattaatagaaaaggttgatttatcattttcatgagttggagaaaattttctgtgcctctgaatcgaacttttcttagttgatgagtgttttaagtgtcagtttacagtgaaatcctgtgatgatacaaaatttagatatagtataattgactctcatcctctgccatgcctattgtctgcaggtgagggccaggctgacatttcatttttaatcattgacttaatattcagtaagtaaacctgatatgtgaacttttctctccctttcctttctattctgtaactggaagactaatggaaaaatacagttttctgttaactttgcaataagccctgtgtttcatgtattaatagttggattttttagaccccacttaaaagagtatatctgggttcttaatgtggtggcagtggtcccaaaccttcttggcaccaggactgcttttgtggaagacaatttttccatggacgagcgtggatggttttagcatgattcaagtgcattacatttaatgtgcactttattattattacattgtaatgtataatgaaatagttatacaactcatcatagtgtagaatcagtaggagccctgagcttgttttcctgtgactagacagtcccatctgggggtgctggggagacagtgatagattatcaggcagtagattctcataaggaatgtgcacctagatccctcgcatgtgtgctttacaatagagttcacgctcctatgagaatctgatgctgctgctgatcttacaggcggcagagctcaggtggtaatgtgagcaatgaggagctgctgtaaatacggatgaagccttgctcccttgcctgctgctcacctcctgctgtgcggtctggttcctaacaggccacagaaacccctgatatatagcgtttaatatataggatactcatataaccagaggtacttatttcctagctcaactatatggaattaagatgggaactagatagtagataaaaatgagcactgaggagctaaaagagtgatcacagaatctgaagtaaagttgttgtttttttatttaatcgatgtgaaagtcctttggccagtgtctcccacagtagttactctaaacgatgttgtgctgtaataaatagtctgtggccaaagtttaggaaatgctgcttatagcatccctcaaaggactgccattctttggatcagactttggaagctctgcattaggtgtatttagcccttgtttttatttgagaaggggaggaaacaaacatttaatgaggatttgctccactgggtctaagtggtatctccattttgcagacaaggagtctgagtccctgctggtgggtaaaggacacaaaactaataatgaggcagaactcggaatggatccctaatcttgccgattcctaagtttttgcccttttgaactacgttggcactgtgtggttataatgaactgctgtctattagactttactccttaggaacagcaatttggcaatatatacaaggaaaagactaagctgccctacttagggaagaagaaaaggataataagttgactattcaacacaggttccacatcatttgctttgtatattaatagatgaactctgtgtgtttctatagtgaaagatttcagacacgactgtaaagtgctttttgagtgagatttgataccatctttaggtattccatacatttttttttttttctgacattgtaggaccattttagcctcatctctgatcaggtatagtacagcttaggtaagatattaactttttatagcttcattgtccttatttggaagtggtgatagtaactacctttctgagtgattgtgaagcaggtaattatgcatgtaagatgcttagtacagtgtctggcacatagtaatcttagctgctgttattattagcagtaataacaataataaggcttaggttgggttgttacctttctatatcctctttttttttttatttaaactgttatatatacaggatgttttttttttttgttttttgttttgttttgttttgttttttgagatggagtcttgctctgttgccaggctggagtgcagtggtgcagtctcggctcactgcagcttccacctcctgggttcaagtgattcttctgcctcagcctcccaagtaggtgggactacaggcacacaccaccacacccagctaatttttgtatttttagtatagacggggtttcgccattttggccaggatggtctcgatctcttgacctcatgatccacccacctcagcctcacaaagtactgggattacaggcatgagccaccgcgcctggccttcccctatatttatttaaggaaaaatcatcaccagatgcatttttaaagtaatagaaattccatcttaaatatattttatagggcattaagaaagttgcagttgtcactagggatctggaagtttttaagtgagtattcgtaatcaggaaatgttggcctagtaggtacctttaaagttttgtttgtgtttaatgtgaaatgtgtattttcaatagatgtgatgtttgtatagttaatatttttagactgcattttttttttttttccaaaaactgttttcaggctagtctgtatgcactggcagtctggtttgtattgaccgttaggtattgagttttaataaaatgttcaaatatgatggacataccacattatggtgagatgtgaatgaagattgtcccccacacccccaactgggttgtccacagctgtattcagtagaattaacttaaatggtccaagatactcttcaaaaatttgaataactatttgggaccattcagtaccgtgaaggctattaactgtgaattgagttaagcagaatactgtatgttttagttttttctttagtttttattcttctcaattttgaggaagttggggagagaaacctttcccctactctgaaaaattttctcttccttcctttttatttcctactttgaaatagccaagatcattgggacctctaagaatatcagataatatttacagcttgaggtagagtgattttcatgggaaaccttttctcataaagtaaaatactcttcgtccctgtcaggacatttttagaggagcagcagacagcccctcactactttgtcattacccagggcaagggaagggaagaatgaatgacaggtttcttcttttttcttttccaccacttgttttcctttccctttccttcctttcttgttacccttaggtgtctgtgggttctgaatttggatttcagcagaatggagtaatttttattaaactttttagggaacctggtactcccaaacagatagtgaatacttttttccattttggggtttttatttttatgtcacttttaaattattaagaagttttcaattatataatactagatagactagtttaataaaccactgtatatccatcatcaatttctataattacatggtcaatcatactttttctataccgttactactaacccccaatttattattattattatttatttatttatttattttttgagacagggcctcactctgtcacccaggctggagtgcagtggcgtgatctcagctcactgcaacctccgcctcccggattcaagtgattcttctgcctcagcctcccgagtagctgggattacaggtgtgcgccaacatactggttaatttttggatttttagtagggacggggtttcaccatgttgcccaggcgggtcttgaactcctgacctcaagtgatctgccctctttgacctcccagagtgctgggaatacaggcatgagccaccgctcctggcgtcccaaatttttttttttttttttttttgagacggagtctcactctgttgcccaggctggagtgcagtggcgcgatctcagctcactgcaacctccgcctcccaggttcaaggtattctcctgcctcagcctcctgagtagctggtattacaggcgcgtgccaccatgtctggctaatttttgtatttttagtagagatgaagtttcaccatgttgatcaggctggtctcgaacacctgaccttgtgatccacccacctccgcctcccaaagtgctgagattacaggcatgagccaccgcgcctggccccaaatatttttaaagcaaatttcagacatcatatgatgtttttggaaaatactatttgtttctaaaagagaaggatgcataagacaaagaaatacaaatacagcaccatgattccgccttttaaaaattaaagaattctgtaacatcagatccagtcagtattcacatttctgtgattgtatctttttttcccttaaaaacatggtttgtttttttactaaagattcaaaacaaggtccgtagcatttggttgctatttttaactctcctttcaattggtaatattttttgtttagctcttccttgccatttatttattgaggaaatcagatcatttgttctttggaatttcccacattcaaggttttgctgattgcatccctgtggttatttaacaagctcctttatttcttgtatgttctgcaaatagttggttagactttttagtcagattactttattgcatggtactgaatacaggtgatcccgaattcatgatggttcaacttatgattttttgattttatgatactgcaaaagtgatatgcattcagtagaagctgtactttgaattttgatgcaaaattctttataataactttgttataaagttttatgtcagggctttgtgttaggtgattttgcccaactataggctaaattaagtgttggatcatgtttaaggtaggctaggctaagctgtgatgtttggtaggttaggtgtattaagtgcattttcaacttacaatatttccagtttacagtggatttagtgggcgtactccattttatgtcagggagcatttgtatttcctattgcataacatcaggtgtcatgtgatgcctagttacctctcttttttttttttttttgatgttacagttgattactgcgtctattcttttgaagagatcctttatgtattataaagttccccatcagtctttcacctaatctctttaacagtcatttatgatcattgtctagaaaagcttgtctaattcccgggccacatgtggcccaggacagctttgattgtggcccaacacaaatttgtaaactttcttaaaacattatgagattttttacaatttttttttcttcatcagctatcgttagtattcatgtatttgtgtggcccaagataatacttcttccagtgtcgcccaaggaacccaaaagaatagacaccgctggtctagatcaaggtttctgcaaactacagcttataggccaaatacgatccactgcttattttgtaaataaagttttattaggatgtagccacacttgttcctttatgtattatctgtagctgattttcacatacagtggcagagttaagtagttaagacagactgtgtgtcctgcaaagcctaaaatatttactatctggccctttatggaaagtgtgctgaccccaatctagatcattatttctttagagatagccaatggtcatattctgtcattcattttgtatttgtagctggaatttttctataaagaagaactttacctcaattttattattatcctaagaaaaagcagggtaagtcttgattctttagcatttgacagaaacagtgaggtgttttcttctttttaagtacgtatttatatgaacccccagttttgagtatatttgatgttttaatctattctctttaattgtcaaattgttccatttttgccaatgtgagccccgtcatgttggctctttttatctttccatataacctcagtagtctttggtaatcctgttttctagtatgacaagatgttccaggctcatcttgtacatcaactgtcttagatatctagaaccagtcattactctaaggggttctgattccttttagtggggagtagtatttagagagcacagtttgagtgtttgttgctctgggttggtggttgtttttaggatcttttagtggacagagctagggtgtggttgtatgtctgtgtgattttttaaaaaattgtgtgaaaatacatatagcgttgtattgactacttgaacgattttaaagtgtacaatcattagcattaagtaccttcaccacgttgtgcatctattaccaattagttccagagcttttccctaccctgcaaggaaaccctatattcattaaggagtcactccccatttcccccttgccccagacctggcattaatttgctttccaactctgtggatttgcttattctggacatttgatataaatggaatcatactttatgtgaccttttgtgtttggcttttttccacttagaataatgttttcaaggtttatccctgttttagcatgtatcagtacttcgttcctgtttatggctgaataatattccattgtatgcatatattacattttgtttattcagttgatggacattttcattttttatggcttttggctattgtgaatagtgttgctgtgaacatttgtgtacaagtttttgtttgaacacctgtcatttcttttaggtctgtacctaataatgaaattgcagggtcatatggtgtttctatgtttaatttactggactgccaaactgttttccataatggctgcaccatttcacatttcctccagcagtgtagtagggttcccatttctccgcatcttcttcaagccttatttctattttttgattattgctatcctggtgggtatgaactggtatttcatggtggttttgatttgcatttccttaatgactatcgatgtagagcatctttttaggtgcaaaccaccattgttggtggtttgtgtattttctttggagaaatgtttatgtaagttctttgtcttttaaaaactggatagtctttttgttgttgagttttaagtgttctttatatattcttgatacttcacctttgtcagatattataacttctccattctgtgggttttcttttcattctctttttagtgccctttgatgcacaaaagttttaaatttagatgaagttgaatgttcctgtttttttctcttcttgcttatgcttttggcatcatatctaaaaagagcattgtcaaatctaaggttatgatttacccatatgttttcttctaaggggtttgtagtcttatttcatatatttaggtctctgatccattttgagttaattttagtatatggagtaaggtaagggtctagttgtacaaactccatttgttgaagagcttatttttttccgcattgtgtggtgttggcactcttattactcatcagttgaccatagatacatgggtttatttttggatgcacagttcttattcccttgatctgtatgtttgtctttatgccagtactacactgtcttgattactgtagctttgtcacaaattttgaaatcagtaagtcctccaacttcgttctttttcaagattgctttaggtattcagggtcccttacaatttcatatatattttaggattgcctttttcatttctgcagaaaaggcctttgggattttggtagggattgagttgaatttgtagatcaatttggatattgacatcttgacagtattatgtcttcctatccatgaacacaggatttcttttcatttgtttaggttttctttaattttctttagcaatgttttgtagttttcaagttttgtaaatcttcagttaagtttattcctagttttttttatttttctttttggatactgctataacttgaattgcttattagtatccttttcagattgtttattgttagtgtataaaaattctgatttttgtgtgttgatcttatattctgcaactttgctaaattttggaatttttttaaatgggaaaacacactgtgattcatatcaatacttccaaatccgattttgtttcaagattaagggtttagggttataaggttttctctctttcttagctttatactttttttctcttatgctggaaattttgagaataatgaattgctttattatttatatttatacatatatattagtatttttgaagttattgtgaaaaatggttgttgaaaaacaatttaataattctttgcaattagtataaatactagggaggtacagttaaattgctttttcattaattaattatttatttaattttttttgagacagagtctcactctgttgcccaggctggagtgcagtggcacaatatcggctcactgtgacctctgtctcctgggttcaagtgattctcatgcctcagcctcctaagtagctgtgattacagatgtgcaccaccatgccagctaatttttgtatttttggtagaggtggggtttcgccacgttgaccaggctgggatcaagtgatctgcccaccttggcctcccaaagtgctgcgattttttttttttttttttttgagacagagtctcgctctgtcacccaggctgcagtgtaatggcacgatctcggctcactgcaacctctgcctcctgggttcaagcgattctcctgcctcagcctcccaagtagctggtattacaggtgcctgccaccgcatcctgctaattttttgtatttttagtagagacagggtttcaccatgttggccaggctggtctctacctcctgacctcaggtgatccgcccaccttggcttcccaaagtgctgggattacaggtgtgagccactgcacccggccagcactgatttttgtatgtaaacagttccatattgatggacattagggtattaaatagggaaagtttgatgggaccagatacttggttcttcttgtggcacttaaactttaaaatattttgttttcatttttatcataaagatattttaccacggatactcaaaacagtatagaagtgcacataataaaaagtttaaaatgttctctgattcccatctgcccacttttcctctattcatatctccagaagttactactggttagttcaagactttttattaaaggcatgtgcagcatttatacactgtgaatgcttttttaaaaaaattgggatcatatcatgaatattctgcaacttaattttttaaacatagcattattagttaaccttttaagtttggctaatgagaaaagagtcctgaatataaataagattttacaaaatgattttgggcctttttttctgtgtcattgatactacatacatattttttgcatgtttgtatgcttcctaaatcttacagtattgtaatctgctctaaagtccagaaagtagggtatatattcctctttactttctctgtaggctcaaacttatgtttcgaaagaaattgagaaaacttttattgttgtaatcaattatggtttaatactaaaagtaaatccagatacagttgagatgcctaccagcagagttgaatgtaagttccataaaagtaggggaaaagccttctgatcttgttcatcactgggtccctagcacctaggacagcgactacctcctcattcttcccattctctgtatttgttttacgttttactatataaattataactggatcacgccattcaaactgttctgagttcttttttcacttgtcagtatatcatagataggttttcatgtcaattcttaagtatctgttcttttaaatgagtgtattaatggtgatactatggattacataattaggcaattttaagacttaatttgaactcctttttttccccttagactttggtattagtgttttatctttaaatattagtgggagatactaagttcagagttaggatggagtgagagtgtataacttgctgtatatttttgaagcaaacatgtaatgaaaggtggtacatgtaacatactttaaacaagtctaatatgtgattattctgactatgaatattggagtagttcactttaaaatatttttggcaatgaattcacatgaagaggaatacaaacagtcaacatgtaaaagagtgtttagtatagttaaagaaacaaaaataaaataagataaaattatactctgtgttccccaaattgttaaaaattagaaatgcaatacttagttgctgacaagggtttcaggaggtatgttgctaaaggataataaattcatatatggccggaaatggtggcttatgcctgtaatcccaacactttgggaggccaaggcgggcagatcacctgaggtggggagttcgagaccaccgtgaccaacatggagaaaccccgtctctactaaaagtacaaaattagctgcgcgtggtagcacatgcctgtaatgccagctactggggaggctgaggcaggacagttgcttgaactcaggaccccgaggttgcggtgagccgagattgcaccattgcactccagcctgggcaacaagagtgaaactctgtaaaaataaataaataaataaataaataaattcatatattctttctggaggacagtttggaagagtttcagaaattctgcttctaggacttttaagtaaaataaattaagggtatgcccacaaacttagatatacctgactgtttatgaaaattttaatcctggaactaataacaataatagtgtctaaacagtgtttcttttgtgccagacattacatttatttaatcttcttaacactcctgtggtattcacacagtaagattacaaatgatgatgatgtagaacattttacattgaaataaattgataatagtgaaaatagcacattgcaaaggagtatgtgcagtgtattttcagaaattgactgcaacaaaatctagagaatttgtgagaatatgctctagaatatttagtaaattataatcccgttattcaaatagattttgctatctttattttcgaatttttctacagtaaacatgtattatctaacaagaaacctaagttattttttaaaatgtcctctgattttataaaataatttatttctggatgcctataaacagtaaattcctcacgcatctttaaaatagagatttaaagtgttactaatggaattctaagcaacgcttggtcagcacacaaaataggaattgaaatgtccttgtacagcctttgatttctgccaatttgatggtgtttttttgatgacagaaatggaaagagtagaaagttaaggttaagcatctaaagtttgaagcctgacaacagaaaagtgacaaaatcttttaaatgtttatttgtggttgctggcaatgaagcattaccataaataaacaaataaataaataggtggacagattgactgactgacttgctacattttcatggtgttgcaatcaggtattttctttttcccagttgaaacttagtaactcatatttattgtttaaccttcctaagaattgatttctttcaaatcatctgagtctttctgtcccaagattttctcttttttgtttttttgaagcagggtctcgctctgtcacccaggctggagtgaagtggcgtgatcagggatcactgcattctttatctcccaggcccaagcaatccttccacctcagccttccaagtagctgagaccaccagtgtgtgccaccatgcctggctaatttttttatttttgtagagacggggtctccctatgttgcccaagttgttcttgacctcctgggctccagtgattctcccgcctcggctccctaagtgctgagattacaggggtgagccactgtacctggccaagactttctgtcttgctcctacccttttcaagaattgaagaaatttgttcccagattgctgctaatgtatctggtctgtctaggtctaatacctgtgttagtttaatgtagtatcgtctttaagaccttgttaaaatgtttttcttaggccttcttttacacctttttaaaaaaatcggcagctgttgtccttgaccctgcactttccatttcccttctgtgctatattttttccttctaacacttatcaccttgtaatgtataatagattttgtttatctgtgtctattcttctcccctccctctttccgattttaagatataagcaccattgatgcaaggagttttgtttttgtgtggttcattgtgtattcccagagttcagggtaatgcctgtgtagttcattgtgtattcccagagttcagggtaatgcctggcatataacaagatttcagtaaaattttttttgaataaatgaatagtgggcactcagtatttgtggaatgattagatgttctatttggttgatgaaagtgaaatttattctaagtgtttacagaagaaggttagggttctatagctgttttgtagtatggctagttcattgtagctccagtaatagagttaaatttataggcaggttggaatttcagaactttgttccctgatacatggtaggtgcttattaagtattgctaaatgaatgtcaaaagaagctaataaagtgagtggggttgggggaaacctagcttgctgtgagattctggcctaactggcatagccttttgggtgaggaagttgaactaagatttcagagctctcttgctttctcactaagattcacctccagggactttgtgtttgtaagtatattcctttggaattcggaagttgtaaaaaagtgaattggatgaaacttgctgtaggattgcttttttggaatcaaaactgttgttgaatgttaattagcaccacagctttgtgtgaaggcttttagacttgagtgataatgagattcattattagagacagtgtgtgttaggtgttccaaggcttccacttttattcatccagcacttgagaccgactatatgctaggcattctgctagactcctgaagatacaaaagtcaaatagggcagtaacgaagagaagaagatataaatgtttgttccagagtgctgctttttgaggtttggggtttcccaaaaggcaggggaatttattttattgagtatttttggttttgatttaatttaaattaaaagtgaatatgagccattaattactgagaatatgtttaatcagaacataatttaatatcaatttgctattgagtcagtatgtatgtatgtatgtcttttttaaggaattagcatttattgagtattatatcttacactcttgacatgcattctttttttttttttttttgagacagagtcttgctctgccactcaggctggagtgcaatggcgtgatcttgactcactgcaacgtgtgcttcctgggttcaagcaatcctcctgcctcagcctctggagtagctgggactacaggcgcatgctgccatgcccggctaatttttgtatttttagtagagacagggttttgccatgttgcccagtctggtcttgaactcctgagctcaggtaatctgcccaccttggcctcccaaagtgctgggattacaggcatgagccaccatgcctagccacattattcttttgacacagtcctcataataatcctgagggagaagcattattacctgtattttacaaataagaaaattgagtttagagaagttaagtaatttgtttaaagtttacagctttataagttgtggatttcaaaccaggtttttttttttgatactaaagtacattaacagcaagacatgctaaagattactgcatcttgagatgtaagaatttctgtatatttactctcaggagactctataactccaccatccaaaattagcaactaattaccgctagtgacatgtggctgttgagcccctgaaagttggctagtccaaattgagactggctgtacgaataaaatacacaacagattttgaatacttagtttggaggggaaaaattcattaataagttttacattgattactgaaatggtatgatttatattatatttttacatagtagttaaataaaatatattatcagtataaaaaagtacattagctttttgtgatgcttctcaaaggaagttattatagtttttttctttgtctgtagataatgttaaataacaagatgtattgactttgaatactgtactgtaactgttccccccaaattgaatctttggctttttaaccagagtatttaaaagtacctttttccttactaaataaataaaatatttttgttgtagcaagcaatacaagattggtggaaaagaataaagagaaagaagaaaatatagctgggatagggagagagagattttgattgatcccttttaatcctttgatgtacaggtggtatttaacataatacagtttgggcttctgactctctgagagctggagtcaaatctgggctccactatttaatgggttaatgattggtgttttcatggttttggggtaagttacttattccggttttgcaaatgagagaactgaggtttagagatgtcagcctatgtcatagggttttgaagattaaatgtgacaaggcatgtaaaatgcttggaacatacctaaaatttctaggcacatcctagttctttgcacatagctatattatcttttactaaaatgagtcaacaaaaattgtaactgcttattttgaacttttaatatatatctatctttccacaggaatcaaaacatttaaaattatcagatgataactaatatatacaatggaatgctgtaatatattcagtatcctcttcttgctagacatttaattatttccagttttactttttgcagttaatgaaatgcataggtgaatattttcgtagcagaactttacctatgttcttatctgattaggatagagttggttggttgaagagtatgtatactttaaagatttttgacccattttgctgaattgccttctagaagttcctagtcacgttactaggatttacatgtaatcctagaatttatctggcgacctgtttttctaaattcttattaaatgagatattataatttaaaaaaaattgttgatttaaccacttttaatttttacattgctttgattactagtaagttcgaaggttctttttctttttcttttttcttttttgagacagaatcttgctctgttgcccaggcgggagtgcagtggcacgatcttggctcaccgcaacctctgcctcctgggttcaagcgattctcatgcctcagcctcctgagtagctgggaccacaggcatgagccaccacgcattgctaatttttgtatttttttagtagagacaaggttttgccattatggccaggctggtcttgagctactggcctccagtgacccgcctgcctcggcctcccaaagtgctgggattataggcatgagccactgtgcccagcttctgaaggttatttttctacctgtatattggccccttgtgtattatgctgttttcccattagtgtttcatgtcctcattcccattttgggggtatctgtcactcttctggctttggggtcatgctcagagaaacttgctcttcctcaaactataaattggcagtgtttaaacttcttgctctcaggactccttagtactcttaaaaactattgagaacctctggtcaggcacagtggctcatgtctgtataccagcactttgggaggccaaggtggggcaatcacttgaggtcaggagttcgagaccagcctggccaacatggtgaaaccccgtctctacgaaaaatacaaaaattagctgggtgtggtggtgcacgcctgtaatcccagctacgtgggaggctgaggcaggagaatcacttgaacctggaaggtggaggttgcagtcagccaagatcgtactagtgcatctccagcctggacaacagatcgagactgtgtctcaaaaaacaaaactattgagaacctcaaagacttttgtttactccatctcaaaaaacgaaactgttgagaacctcaaagacatctgtagatctttgccatcttagaaattaaaagagacatttaaaaaatactactttattaagatatagtaagccatttacatgttaacatttttaatgaaaattacattttccagaataaaaattaccaagaaatttttcatttttgccagtctgttgcttaatagaagatacctggattctgtatatgcctctgcatttaatctgttgcagtatcacatgatgtgtaccctctggaaaagttgattgtataatcaggagagaatgagaattaaaaaggcaaatgatgttattatgaaaatggttttggctttgtgggcttctgaatgggttcaaagatcccaagactacagtttgagaaccactgatgtaaataatcacttatatattttccttttgtgtttttatggctgaatttaaattccgaataaattctagtggaaattttctaatttctcccctctcctgcctaccctctccaattggctaatattctttgttgaaagatccattttcatgtaaataattgactgactaggatgaaacagtagacatatctgctttttcccagttgttactgagaagctcactgttcattgaaaacagtagtctttgcagtctttccttaatgttgtatctctattttggtatattcccttattttcttgatgtgttctcccctcctcactctaactcccagttttacaacaaattgccctaaaatcttaaagatttttcattcatactgattgtggcattttgctctaaatattgtttcctccctgatttagaaagtaatttaaaatgtacatagaaacataaaccaaaaaagaatattttgtcgctttgaatatgaaaagtgatattgatatactattattgctgtactgtgatggagtatatcacaggttatggaggttatttcaatattgaaaaaatgctagttgagtatacatacattcctgcaccattgttaataaattatattctttttgatgtgttgcttagcttcttgggaccctttactcactagacttttattgacagctgtgttccaaaatacagttagataaaaagaacaagacacatttttttttctaactttgcaggttggtagagaaatacacatgttctgtgataagtattattatagccacaaacaattaagaatattatgggagggcctaggcaagatatcgttaagaagtgagggaggaatgaaggaaagggaattgatttgaaaagattaaggttgtacaatcttcctttagtagttgatgatttctttaggtgtctgagtccaaaggagagagaaaggaggagtcaagaaagacacccagatatttgtctgggaagaccagatggataccagtgtttatcaaaatgtggaataagccctacttccaacaaaacaaaactcattacatgtgctacactttcaaagacactgtgttattgttttccaagatgagttcaattgtgggcatgttagtttgaggggcctagggtggagatttgtggaagccatttggagagctatcaggagacttgtatgagctgatgagcagtgtagcataagtaggtgaaggaaatgcttaagatcatcctttgagaatttttagtaggagaagagaagatggtcagagaccctctgataattgagggacaggcagagggaaataaattaagcaaaacataaaaaagaaaaaagggtcaggttgtgttgaaggcaagtgaccagtttaaagaaaaaaggttaggggagagagggatctgaaatgttaaatcctgcctaaaggacaaataaaatctgaaaagtgtttattagatttaggaataagaaggcattgatgactttggaaaaagcaactaaactgggaagttgggtgtagaagctggagaagtggaggatatagaggtgaggaagtggaagacagtgagtattgactaccgtttgaaaagtttgcctatgaagctggtggagtacaggttaaaagtgagcaagcagggatttgaaagtgttaatgttctagggaaggagagagaggagggaatgagagattgaactaaggataaaataccatcatcttgaactttctagagaaatgttttttatgcttcttgtttgctctttttgtaaaaattgttctaaggtattttttagataatgctgaatatcttttttgatacctttatgatatttcagctaccatgaatatcagttattgtactgccggtatcaaagaatatattaatagcaacagccctgttctaaaatacaacagttcagggctgtattagttcattttcatgctgctgataaagacatacgcgagactggatacttcatacaggaaagaggtttaatggactcacagttccacgtgactggaaggcctcgcaatcatggtggatagcaaggaggagcaagtcacggcttacatggatggcagcaggcaaagagagagcttgtgcagggaaactcccccttataaaaccatcagatctcataagacttattcactatcataagaacagtatgggaaagatgtgccccatgatacaatgtgggtccctcccacaacacgtaggaattttggcagctacaattcaaaatgagatttgggtgggacacagccaaaccattcaggggccgtttaatgtaattatatagtagctttttaatagccagttttatcttttccttgtgggtgcacatgtgttttgcccactaactcattgatgtggttggtcctagcaatagtagtccctattactacaaatgtgctaagtaactgtgaatgggaaatccacattaccaaattgttagaattgttctttgaatgaaattactgattttaatcattagattgtaaggaaggtctggggattacatctgtaaagtgtactctgtgatagatgtagttttctttttcttttgagccagtgtctcactctgtcgcccaggctggagtgtagtggcgcgatctgggctcaccacaacttccgcctcccagatttgagtgattcttctgcctcagcctcccgagtagctgggattacaggctcccgccaacacacccggctaatttttgtatttttagtagagaagaggtttcaccatgttggccaggctggtctcgaactcctgacctcaggtgatccacccacctcggcctcccaaagtgctgagattacaggcatgagcaccatgcccggcctatagttttctactgctgttttacttagaatgtagagctctatagtagagctctgtagttagactgctttagaatcccagctctaacacttacgaactctgaccttgaacaaatgacttacctaagagctttcttcatctttaagttggtgataataatagtacctatctcacacggctattgaggttaaatgatgtaatgcatgaaaaacatagcttggtacaaactaggtacttactcagtaaacagctgttaataattattttctccctgcctccaggattttgattttctaagcttgatgtttttggaagtcttcttgattagaaagatgttactatatttgaaaagggaatagagtcaactagagtcatattgcaaattttatgtgtctgagagtgtaatgagaatttgcagcatatgtaaacaagtagatttatttttctgaggtaggtccatggattgttaacagtggtttagggaaggttaatgtgtttaaaaatgagaggtaaaaaataacctagaattaccatatgggatattttacttggggtgcgttgggggttactgtggactagctattttaggacaggaaattaacataacctggtgaggctcatgaatctttcagccttagtatcagaactactcggtaacctgtaatttaacccatggcagtacttggagggcaggaagttagggtttgtgcctggtctgagaaagcctattttcacctttttatgagacttgtgctcttaaaagacagagaatgaaattatctaagacatttgacaaccatcaatttagtcattttcttccttctgtcaaataaattgtactattcttttaaacattttagagccctgttgaaaatttgcaccttttttatatagtaaaacatcaatggatggaaaatcctgttttctggggtagccctctttattgaacttctctaacacccacagatcccgtttataaagaagaggcacatttagtatgtttaaaaatagtgaactctttccttctgtgaatttctcaggatgtgttaatggtgtttaaagtttaatgctgctaaacccacacaggaattttcactggttttaaatgccacaaaaacagtttttacttttgttgatagctggtttagtaaaaagaccttgttgttaaattcaggaatgatttaacaaattattaaaggtttcattgcttttttcaaaatacttcctatttgcaagtctcttcatatctgcagtcataccaaattactcatatcttttttttttttttttgagatagagtctcactctgtcgcccgggctggagtgcagtggcatgatctctgctcactgtgacctccgcctcttgggttcaagtgattctcgtgcctcagcctcctgagtagctgggattacagatgcccaccaccacacctggctaatttttgtatttttcgtagagatggggttttgccatgttggccaggctggtctcaaagtcctgacctcaggtgatacacccgcctcagccttccaaattgctgggattgcaggcgtgagccaccgcgcctgacccagtatagtgctttttataattaattgtgtacttttaaaaaacctttattcatgataaagtaaatccagtctactgagtggctgtgctatatctttaacagctattttatctttatttccttcagtgttacagcttccctacatagtacagattatgttacctaattaaatagttgagctatgtcccattctagttaagaaaactgtcctgttgcctattttcatctgattaaaattttctgactttctttcaatatctgtttttttgtaaaccagcctattcagttttatgtcccaacgtcctgttctcttgcttgcccactgatttttttctccatcattaaaaaaaaaaaaaaagaaattgatagacagcatctggagtgtcctagaccctactagacctggtgtttggcccactgatttcttctcaaaatgattgtatcctgtagtttaatttagctacagtgacccataacacttcactcaaactgcttttctgcctctcagattgtttcctcagtcttgcctgcagagcacttctctacctctccagccacctaccccgtttaagtgtttatattttgacctcagccatttgttcatactctgcctaccttccttctaccctagtgatctggtttatgaaaaactagatattaattctactgctttgaccagatctagtcctctaacccagatcttttcagaatcctagacctgcaggaattaccacctacatgttccacagctactttaaactgaacatgttaaaactgaactcattttctctcctgaccttctctcctcccctaaacagaatgaaacctctatattcttcttcttcctctctatcttggtaaatggcaccattatccatagacgcccctggcttccttcccaggaaccaaagttgtttcctccttacacctagttctccaccagtagtcattcttcaagtctaccccctaaatatctttggaacctattcctcttcatttactagagccttcactttagtttaggaccttatcactctgcctagaccagaggtttgcaaactatagcccataaagccaaatacggctagccgtctgtctttgtaaatcaagttttattagaatgcaacttctgtggtttagatatggtttgtttttcagcattaaaacttgtttcgatcatcaatgtggcagtgttaagagatgaggcctggtgggagatgttttgtttcatggggggtggatccctcatgaatggctttgtacctttttgtagcagtgagtgagttcttgctctggtggtactagattagttctcatgggaatgggttaattctgagataatggattgttataaagccaggatgccgccagattttttgtcttcacatctgaccacttcccctttgagcttctttgtcattttgtgatgtagcatgaaagtcctcaccagaagccagggccatgccctttaaatttcctagcctgtagaactgtgaggtgaataaaccttttctttataaattacccagtctcatgtattctgtcatagcactacaaaatggattaaagcagctgccttgctcattagtttatgtattaattgtctattgctatttttatgctacgaaggcagaattttgtagttgtgaccgagactgtatggcttgcaaagcccgaaatgtttactgtcgggccttttacagaaaaggtttgcctacccttgggctgttacttattttctgtctccagccttgtctattcttctgtcctaccccaggtaaacattcagaagtctgatcatatatccccccatatgaatcttttatttactactcatttgttacagaataaagcttaagtcctttatcatggtgtaagatctttggctacctttctgggtttgtcttctgttcagaaggcatgtggatttgtctctagtatatgcttttacctctgccttaaatgttctctcttctctttctcgtcaacttacctgtctctcaacatctaatacagatgctaccttcccaggaagtcttctgacattccagatttttctttttcttgcttccttcataccctctaccgcttttgttgtatttaacattgtgcagcttttatccatttgaccgtatttcctttgtaaattttaaaaccacccaggccaggcctggagccacattcactgaatattccctcaagaagtgtctgttgactgaataaatggattgcttttgtgttagactcttcctaactagtcagtcagagcaaggattatgtctcatacaatttttacattctctgattgtatctagggacatgctagattcatagtaggtacagatactgattaaattgttgatttgaattgtcatgtagataaagtgaagagacagattcattttggagggttggacattcatcaaattgagactgtctagcaaaacccattaaaaaggaactagatttgccttagctactaacttttcccttgacatgtatagggattttttcccttttctgtacttgggaatttgattgactttcattgaatgttttgtgtcattggttaggcatcatatgatctgttttatgtagtgcaaatataagtgacaatttagatggaatgtgctaagttgatgtattaacatagggcagagtcatactaaaagtactgttattctgggtataaatgggagcagaaatggagtgttaccaatgacattagctgttaggatccataccttttcttaactggattaatttgcctgtttgtggtacctaggtgccaattctggtaggactcctagtagcagcagtagcagcagtaataaacacctatctagtgcattttttatgtgccaactactgttctaagcacagtacataaattaactcatttagtcttcataacaacccaatgagataagattctattatccctgcttaacagatgaggagcctgaggcacagggaactgaaataaataaacttggctaaagtaatacagttagtaagtggcagagccagtatttaacccaggctgtctggctccagagtttatgctcttagtgactatgctagactttgtatgagtcttggaacaatttgaatgcacagttcttgcattccttttgttcccctctaagagaaactctggagttttggaacagaggaggaaatgaggaaatactaaatggttaaaggtaggtttatttttaaaaggcacttatatcacattctatatttattatgagtagttgtaggactcctttttagcatcattctgtttttatcttttcctataagttgaggtaagagtttggttttcttttaccttatctgtagccagttgatgcttactaaatgattggctttaacggttctagacattgtaattgtatttacatagttctgtgaagaactgtgaagatacgtagttcatatatttggaagtgtattaacaattgtggtaatcaagaggaaatcatcattagagctggacagcattgatattctaggtgttgcttttaacaggcttaaaaaacacttggaggtagaacatatacagcagattgcataaagcctaagtgtactgctcagtgaatacaacacccagatcaagttaagtacagaacatcttcatcattattccagaaggctttcatgtgtcctttcccagtcaacaaataccctaccagttatgttgctttgtttttaaaatattgtatttattaccacttgacatatattagtttgtcttccctaatggagtttaaacttggttttgctcatcattctgttccattgctcagcatagtgcttgacatatagtaaatgttacacaactatttgttgaataaattaattggaaaacacttatttgttatgtaccatattctatagcacacagatgctattttatgtactagttgcttgaggatagatcataaatcttagttttctaggatgaggcttttgatatttagtgtgagacttacactacttttaagacaaggaaattgacttctcctggcattgggtttagtgtgtgttcgtctttggttacgtgaatgttagggaatatgagaaagttgctaccagtgagagatactggtagcctatctatctggattgccttcttgagagtatctgattccttatagttatctcagattcttaacttacactcttgatgatctttttgaatacttcaaacagttgcaaaagactaaatgctcttgatcttgtggagagaaaattgtgataggaaatacattacttatcattaatttacttataagacagtttggttatcaccttacattgaaaataatgaaaattctgtttgcctatcgtgaaaaggtttaagataaataaaggagtctgtgctttagaatttgttttagttcaaacttaggttcatgtagaaaagaaaataaattttgagctgaaagtgactctagtattctgattcatgttcctgtctgtcaaatttagctctctcattttacatttgaggaaactggagtgcaaagaagtaatgtgatggtctagtctaaaattaaaagtttaggctgggagcggtggctcacacccataatcccagcactttgggaggccgaggcgggcagatcacttgaggttaggagttcgagaacggcctggccaacaaggtgaaaccctgtctctactaaatatacaaaaaaattagctgggcatggtggcgcatgcctgtagtcctagctacatgggtggctgagacgtaagagttgcttgaacctaggaggcagaggttgcagtgagccaagattgtacccctgcactccagcctgggcagacagagtgagacgctgtctcaaaataaataaataaataaaattaaattaaaattttaataatgaataaactttccaagtgatacatactctagtggcttagaaccattgtgctgtcatgcctttttctttcttactttttaagaaaagagactgttctttaaagcagttttaggtttacataataagtgaacagaaagtagagtgagcctatataatcccttacccccacccatatttccccatttcccctgttattaacatcttgcattggtgtggtacatttttcccggttactaacatcttgcaatgctgtggtacatttgttacaattgatgaactaatattgatactaaattattaactgaagtatataatttaccttttataatttccattagggcccacactttttattgtatagttctgtgggtattgacaaatgcataatgtcatgtatccacgattacagtgtcatgcagaatagttttactgcctccagaatcccaacatccacctatttagccaccttctcatccccctcctcccatcccctcctcccatccacctcctcccatcccctggccaccactgaactttttactatctctatagttttgtctttttcagaatgtcctatagttggaatcatacagtatgtagcctttttagacgtggttctttcacttagcaatatatttaacattcctttatgtctttttctggctggatacctaatttctttttgtccctgaataatacctcattgtatggatataccacaatttttttagctgcttacctattgaaagacatcttggttgcctctacttttgggcaaatatgagtaaaactactgtaaacatttgtgttcacttttttgtgtagacatgttggaagtaaatgcttggtgctgcaaagtgaaaccagcactcaggcaaaagttttcttagcaaggcagtttatttttgcagaagggcgtgtctcgtggatggagcaatggcgagagcacagggaacaaaggagagaaggggtttttatttctgatgtgtagtccctacctcagtgtcactcccctgtgggctggggttgaaccgcacaatttaagctgacttgattggctacttgtgaatttttttttttaaataaggaagagggaaggggaaggtgagttacagtggtgggatgtgtggtttcgaagggtggacgtgtggtttcaaaaaggtggaatgggtgcagagtgggtaaccaagggaacagatgtgagttattgattagagctgatgggaaggttgtttacagtaactagaggcaaggaggcatggaggacaagaaagttgagtttgagaacaaagaacaaggaagttaacaggctgaacctttgaagagaaattcattatatcttacagttccctgcttttaatttttataatcttttctctttaaacctttttaacatgtctgggctttgctgtccgacttgatcctttaaaaggaaaagcttacttgcataaggtggaggagagctaagggagattttagtaagtgctgtttttataagcgtttgcactaacctacaatgcatggtatgacacagcacccaataagaatgagtacaagtattacaactgcaagcaaagtaagaattgaggccacgatttcttttcatttattgaaccacctttttagccatcttgaaaaagagttgttgattctagttaattcattggataaagctgtaatcccttgcaagaccttcactatgctctcattgggggcagtattgtttgggatgaaggtacaatattgagttttcattataatacaaactccacctttttcagctaatatcatgtctagggccattctgtttttccaagccattcttgctagtaggacctaattggtcagctattcctttgacagcatctctggtgtaattaataaatcgctgctgattataatagatgtaatctatccaatctacatttttgttgatacttacccatggaggcaatgattcaaatcctgcagctatttggtcttgggctttgaatttatcaggtactccctgtgagattccaattgcgtctaaataaacttaagagtcaaaagacccataaggggcttctcttacttttcagtgttgtgattttttttttttctctgcttgatgaaatgccagggtgaaagggatagccaactggacaagagagcaagtgctgctccagttacttggtggagtgcccagtaagggtccaccacaataccatcatatacctgctcaaggatggctaagggcagactgatgggtaagctcttggaagggcctaagctcactgtgttccattaagcttcccaggaacgccaagtttttcccattccgtgagagacacaaggtgaaattgacattgagagatggaagctggatggcccttgggggctgacccacagggtgttggactttgggatagagcagggagagagcttggcatgatttattactcctagctgtagaatcctggaagagagttaccatgcagcccatgcccggttgactggagcaccattcgagtggaaaggggacaatctgggcctctggccggccatgcacacaagcataacaattgcttttgtttaatgtgcggacagaatttttgatgcatttcaaccagacatttgtatcttgatatcctattttaattgctagagtttgccttagatcatctgcttctacaatgtttacttcagcattgttgtagggcagggtagaaggtttagatggagaaggaggagggaggttaataaaacgcattttaaagaagcatatagggttgtatccattggtctttactcttaagccgtaaaagtgctctgaagggggtgtagggttggtggaggtaggagtattaatggaaatagttactgggttacaatggtgagatggacaattagagggggtggttcctttggtaaaagtggaggtaagattttaggttggtacagccatctggggaggtccagcccggatctctggtagtccagatgatatctgcccattgggaacatatctctcaatttggggtgtcttggtacccctgccatgagcaagatgcagggtcagtggcttttctggaggggcagaggtatttttctaaagtagagatttgtctttgtcattgttcgtcctcacaaggtgtaacaagacaagcatcaaaggtaatgatttggggtgaatctgacctagttacattgataacaaggtggtcatcaatagaatgagaaaagaagaaagtaatagaatagatggaaagatgaaagagagttaaactttttgtagctttagtttgagaggtttttttctttggataatggcccatgactctggaggtggtggtgttttcttgactcgggtgtgatgggtccatcctttttttgctgtctggactgcggttttagtggttagaagccgcaggtaaggtccttcccaggccagctcaagtttttcctccttgatgaggacgtgatccccaggctgttattaatggactgagagctccagggttagcgcctgtgctaagagacctttggttttaagaaaaagagaaagtaaaggagagaccaagtatataattcttgaggaattggtcttttgttttaaatgtaggaatgtcagcagtggagtgtaaataaggcagtctgtagagccatctcataaagggaaaggcctgtatctttttgaggagcagtttggattttcatcagggcaattggaagacatttggtccatggcaactgagtctttataactaatttggttagatggttctttaagctctgatttgtctttttaaccttccttaatgacggtgggtgccaaggagtatgatattttcatttaatgtttagggcttgggatagctttttaatgatatgagctgtgaaatgggttccattgtctgagtcaatattttttattagcctgaacttgagcactatatttttaattaatgccttaactatattattggctgttgcatttgacccagtgagtgaggtgatctattgtcattaataagtattttagacaacccgttagaggcatctctgattaatttgggtactttggaatggtcttaagcctggactcctttccccaagggataatctcttttatagtttgtttatcagttttcatatatttacatataaagcaactatctataacccgttttggctagggtataagttccatgaagactgcatcacacatggcctggggtccttaatgagtcctttgatgcaggttggacaagacttggtctgtcaatatctatttttattctgagctctctttagtgcctgttcttactagcttttctttctcagtggaagagaaaacagagatcacagtaggaggaggaaggtaaggagttaagtggagaacaggcatttcagaagaaatggcagcctgtttggcttatctgatctgttaggttattttcctgactcttaaaagacaggcttttttggtgtctggggacatagacaatagcgattttctctggcaactgaaggttattcagtgctcgggtgattaattccttgtgaacaaggttttgaccttactgttaataagacctcgttcagcctaaaatctttccaaatgtatgagccaccccaaaggtgtacttagaattggtatagatggttcctcctggttctgcaagtactttaaggcttggctgagtgcaaacaattcacaagtttgggcagaccaattattgggctattttcttgactctatttctttaagagcgtctccatcaattactgaatacccattgtgtctttttccttcaatcacttgggaggagccatctataaagaactgtcgcccagtcctgaagtgagtttctcctaactttggccggacctttgtatggtaatcaattaaatctaaacatgtgtgctttctttttagatttagaactcttgttaagaaacctcctgggttaagcaaattatcagtggttaaatcatcctcttgttttaacagagtagcctcatactcatacacatgtaatacttttccagtggtatattttaatataagtgactctaaagaatcaaagttcttttctggtctggggtagccaacaatgatcacattgaggatttccttatagaagtcttttttgaaggtatgcatgatatgtgtttccatgggcttctttgtattcttgtagtatgggttccatcctgtgctcaccaccatcttatggacatctctacttccagcactggcccaactacaataaatgccggtggatatatcagctggaaggttatctaccacttactcaggaaaattagctgcagggatgcccagctgcttggagccgcagccaaatccctgcaccacttggccccagcagaagtaaggcagatgtcccataatgtagcctgttcggggtttggcccgtggcctggtctgcatgttttgcagagccaccctttacatggtgcctgaaccctggaccagcaagggggcaggagcgtgggctctgcctactgtggaggcacaccagggcccggacgatgccagtgacacagtgtggcagatccttgatgctgcccaccctacaaaagctgcctggcgacttaggtgcatggagtccctttaaggagggatacttaggctgggagggaataggttcatagggtgttgattcccaagagtgagaattgtaaggaggaggagtaacatgagtaggggaaggatatgaagcaggatctaggatggcaacagctgcctgagaggaaagggttggggtcactgagcaggggaagacagtgtaggggatcccatgtgatggtctttaggcatgggaactggcttttctaaccttttattatctttccaatattttaacatgagacctagggggctaggtcttttaacaagagattggggggactatctttgttgctgtttttatcctttttacttcttgtcttgcttggcgtatttcccatgttgggtcctagttaggctgaatcccttgtactaaagacttcttgcctattcttctctgggggcttgttaaggctcaatcctttgtatcagtgatttcttgcctattcttccttggggagcttgttaaggctcaataccttgtgttagagatttcttgcctatcctttagccccacctactggaggtttcttgcacccttttttcgctgcatctgctctggccacttccctcgcgggaatatttcaggtccctcttagcattgatggcgggtcagtataaactcctgacaggatccccaaagggccgccctaagctgtatgaggtgaccacggaactgccgataggacccactcactctgcacagcagtagtgcttagtaccattcacacaagcagcactgcaagcagtagtgcttgtgatcatttacacacttttaacctccagaatcccaaccaccaaggaaatactttgtcgcccctgcgaccttctgactttggtctgtgcacagagttacctagtcgctgtggtatgtgagcctcctttccccgagctgccggcctgtttctttcccatgttgctgagagtctgggtttatttgtcacactgggtgggcctcaattcctttatccctgaggctgctgcaacgaggcagtggggcgcacctcttcacgggagaggaccaagaccctttcccagaggagaatgggaatcccggatgagcccgcagatttgttggagataaatgctcagtgccaaaagttttctcagcaaggcaatttacttctgcagaagggtgtatcttgcagatggagcaatggcaaaagcacagggagcacaggagagaaggggtttttatctctaatgcatagtccctacctctgtgtcactcccgcatgggctgggttcggactacacaatctaagcagacccgattggctacttgtgaatattttttccaaataagaaaaggggaaggtgagttacagtgatgggatgtgtggtttcgaagggtgatgtgtggtttctaatgggtggaatgggtgcagagtgtttaaccaagggaacagttgtaagctattgataagagctgacaggaagattggttttttttttacagtaactagaggcaaggaggcatggaaaacaagaaagttgagtttgagaacaaaaaacgaggaagttaacaacctgaacctttgaagagaaattcagaaaaattcattgtatcttacagacataagttttcaactcacttgtgtaaatatctatgagtgtgattgctgggattgtgtggtaagactacatttagctttgcaggaaactgctgatgtgtcttccagaatggctgtactattttacatttctgcaaacagtgagtgagagttcctgttgcctcacattttcatcagcttttggtgttgtcagtgtttgggattttagccattctgttccagtggatgtataatggtatggcattgttttaatttacaattccctaatgacatatgatgttgagcatcttttcatatgcttatttgctacctgtatatcttcttttgtgaggtatcagttcagattttttgtacactttttaattcatttgttttattattgagttttaagagttctttgtatattttggatactagccctttatcagatatgtgtattgcaaatattttctcccagtctatgtcttgtcttttcatcctgtttcatagtgtctttctttcaaagagcagaagtttttaattttaacgaagcccacttttccattttttttttttttatggactgtgcttttggtgttgtatgtaaaaagtcctcgtcaaaccaaaggttacttggatttttcctgttatcttttagaagttttatagctttgcattttactttaggtctatgatgcagtttgagctaattttttaatttttgtgaatttttgtgcattttgagttaatttttgtgtaagttgatgtgtgtttatttgcatgtagatggtcgcttattctagtaccatttttcagaaaaagactgccatccctttttgatgtcctctttcaatgatgcacatgtttttttgagacagagtctcactcttgccttggctggagtgcagtggcttgatcacagctgactgtagcctcaacctcccaggctcaatcagtgctgccatctcagcctcccgcgtagttggtatcataggtgtggaccagggtttcaccatgttgcccaggttggtcttgaacgcttgggttcaaggagcacacccaccttggcctcccaaagcactgggattacaggcatgaaccaccatgcctggcctcagtggcacagttttgagggtgaattatgataactaaaattgaagaagaaacctgagattgttgtaattaataatttgacttcatattatgcctttaaaaatagcttaggaggaagtaacatgttgagtaagcgcctgggctctgggataaattccgaatttgctatttacttgctgtgacattggacaagttactgaactgtgcctcagtttccttgtatgtaaatgtatttttaggttaaatgaacaatatttaatataaattgtttagtacagtatcttgcatatgttatagctatggaagattattagtaataaagacttctttagatgttttatatattttttattcatcagttcctcttattttattctctatagtgtattacaggaaaatataatagtgttaacctatggactgtttgtgtagttattgatgtcatctggcagaagcagatttacataagggagtttaatgactgacctagaataaccatcataaagagcataaaatgtaaaaaatggagttctaaatgcatgcttatatgctcagtattttctgaaaccactaaataccattaaatacctcaagactaaaggtttgatgtgtaagatggtaaaaaaaaaaagagctgtagtgctttatttttattttttatttacttctttttttgaaatagggtctctccctgtcacccagtctggagttcactttataaaacatatttccttcctttgcatatgacgtattacacactaccggcttgcttaatatatttaggattgtttcttattttagattttgagttatctctccaataagaatacaagttcttcgggataatgtgtcttcagtttttcagtctgtcaccatttctggatggagaagctcatgtttcttaattgcttaagaagttaagcaatttggataattggataagctattacttttaaattattgctttattttatcttgccatttgattcttccttctagagtggatagagggaccatttacaatataatagcgaaatgcatatctgtttttaaagttagaactggaaggccagtaagataaacaagggtcctttagggcaataccttgagtaaaatagcaaagcaatttttttgtttgtttcaagtaattgctagtgaataaggagtatttctatacttctgtatattcagcatttttctttgtgttaggaaacaagatgataattgtttaatgcagtgataggaactgctgttctgctgagttatcacagactttgggttttgtcagttaaaacaaattttgagtgttaggttttgttttttaacaggtgttgacattaattttatttctatgtttgggaacttgtaaatttgtctgacattgattctaaaacttttattgtagcatattattttgatatctgtgtatccaagcttttttcctaaaactgctagatggcatagatctgctttttttttttttttttttttgagtcggagtcttactctgtcgcccaggctggagtgcagtggcgtgatcttggctcaccgcaacttctgcctcccgggttcaagcaattctcttgcctcagcctcctgatgagctgggatttcaggtgcccgccaccatgcccacctaatttttgtatttttagtagatacggggttttgccatgttggcccggctggtcttgaactcctgacctcaagtgatctgcccaccttggcttcccaaagtgctgagattacaggcatgagccactgcccagccagatttgctttttaaattaaatttttgtctctgagtcatttagtaattaagttagtcatggtacccccttctcttagatactttaattggcgatactctgggggtattgcaacaacaaaactgatgatcagaattagtttaacaacataaatattcttaatgaggatatcttctgaattatcataataaagtagtgtttatgtttttctgttacataaaaaaatcgaggactttctttggtaagttatacttcataccagttttagtcatttagcacattagagagtaccagtgagctatacattatgtagactatagatatgttaaaaagtacattctattcatgataaaactaataaactaggaatagaaggaaacttgctccatctgataacatctatgaaaaaacccggagctaatacatagttaatggcaaaatattggatgctttctgcctaatattaggagcaacataagggtgtcctctgctgccacttttttttaacattgtactagagtttctagccagagcaattaggcaggaaaagaagtaaaaggcatcagagtgataaggaagaagtatagctatctctatttgcagatatttatagaaacatcctaagaaatttgctaaaaatctattagagttaataaatgagttcagcaaagttgaactcattttatgtaggctcaatgtataaaaatcaactatgtttctgtacagtagaaatgagcaaactgaaactgaaattaaggaaacagttccacttataatgccatctaaaggaacaaaatacttatgaatacatttaacagaagtataaaacgtataatatggaaattacaaaacatcgttgaaagaaattaatgaatacctaaaaaaaaggatggacatcctatgttcatgaattggaagacttaatattgtttaaataatagtgctctcctagttgatctacagttccagtggtttatcaaaattccagttgccttttgcagaaggcaaagttccaattgccctttgcacaaattgataaactgatcctaaaattcatatggaaatacaagggatcctgtattagtttccgagggttgcagtaacaaagtaccaaaactaggtggcttaaaacaaccgaaatttttctcacagtttagaagctggaggtccaaaatcaaggtgttggctctgactgctctagggaattatccccgcttgctgcttctagtgtttgctagcaatccctgacatttcttggcttgtagatcactaaagtcacttagatttcctctacctgtgtgtcttcatattatttgctctctgtgtatgtttgtgtgtccaaaattctttttgtaaggacaccagtcatattggattagggcccatgggaatgacctcattttaattttaatttttttttttgagatggagtctcactctctcgcccaggctggagtgcagtggcacgatctcagctcactgcaacctccgcctcctgggttcaagcaattcttccaccttagccacccgagtagctgggactacaggtgcctgccaccacgcctagctaattttgtgtatttttagtagaggtgaggttttgccatgttgtggtcatgagctcctgacctcaagtgatctgccctacttggcctccccaaaatgctgggattacaggcatgagttacctcgacctctcctggccctcattttaatttgattacctttgtgaagaccctgtttctaaataaggtcacattctgagttactttgtgattaggagtttaacatatcttttttggggtacccagttcaacccataacagactctgaatagcccctcaaaaattgaaaaataaagaataaagttagaggaatcacatttctcaatttaaaaatttacatcaatccagacggtgtggcgcttggatatagattcatggagtatgatcattagtttaaaaataagcccctacctttatggtcaattggttttgacaaggataccaagataattaaatggtgaaataattttttatcccccacaaatggtctcagacagctggatatttgcatgcaaatgaatgaagtttaactcctacctcataccatctacaaaaattatgtcaaaatggattaaagacctaaatgctagagctaaaacaagtaggagctaaaactcctaggagaaaacataggagtaagtttttctgaccttgggtaggcagtggcttcttagatgtggtaccaagcacacaagcaacaaaagaaaaaatggataccttgaacattatcaaaaataaaaccatttgtgcttcaaaacaccatcaagaaagagacaacagaaagggaaaatacttgcaaattatatctgataaaggacttgtatccagaatacaagaagaactcttacagttcaataataaaataaagtccaattaaaaatttggcacaggttctgaatagacagaacctatgtatatctacttctacaaggaagatatacataatggttgataagtgcatgtattagtctattcttatactgctatacagaactacctgagactgggtaatttatgaagaaaagaggtttaattgactcacagttccaaaggctgtataggaagcatgggtgggaggcctcaggaaacttaaatcatggtggaaagtgaaaggggaagaaagcacatcttaccgtggtggagcaggagagagagagagagcgagcgagcaagcaaagggggaagtgccacacactttcaaacaactagatctcgtgagaactcactatcacaagaacagcaagggggaagtctgtccccatgattcattcaactcccaccaggcccctcctccaatacatgaggattacaatttgagatgagatttgggtggggacacagagcaaaaccatatcaatgcacgaaaagatgctcaacatcattagccattatggaaataaaaatcaaaaccatgagataccacttcagactcattaggatggctagaataaaaaagtcagattataaccaatgtttgttaggatatggagaaattggaaccctcgtacactgctgtgggaatgtaaaatggtacagctgttttggaaaacaatctggtagttcttaaaatacacacatagagttaccatataacctagcaattctatgcctagttatatatacccatatgttcatatatacacatgttcatagcattattcataatagctaaaagtagaaaaacaacccaaacatctatcagttgatgaatggagaaatcaaatacgggatttccataaatggattattactgaggaaccaaaagaaatggaccaaagcatactacaacatggatgaacctggaaaacattctaagtaaaagaagccaagcacaaaagaccaagtatcatatgattccacctatataaatgtccagaataggcaaatctgtagacagaaagtaggttactgtttccttagggctggaatggaaggattgggggatgacacctaagaggtacagtgtttctttttggggtaatgaaattgattggggtgatggttgcacaagcctgtgaaagtactaaaaatcgttcaatgtgcactttagttgggtgaattatttgttatgtgaattaaaacttaatgaagctggtttaaaaagtacattgaattattacaaggataagggaccctatgttctagggaaatgtacatattggaatatttaactaacatgagatgttataaagtagaatatatatgctgccaaatggatggtgtagatcagtgctgttcagaaagtatattgcaagccacgtatataattaaatttttctaatagccacatttttattttttagagaaggggtttcactattttgcccaggctggacttgaactcttgggcgccagtgatcctcctgcctcagtcttctgagtagctgggactacaggaacatgccactgctcccgccttataagagccactttttaaaaacttaaatggatgaaattaattttttttttttttccgagacggagtctcactctgttgcccaggctggagtgcagtggcacaatctcggctcactgcaacctccgcctcctgggttcaagcgattctcctgccttggcctcctgagtagctgggattacaggtgcctgccactacccttggctaatttttgtatttttagtagagacggggtttcaccatatcggccaggctgatattgaactcctaaccttgtgatccgcctgcctcggcctcccaaagtgttggggttacgggcatgagccaccacgcacaggctgaagttaattttaataatatattttatttaccccaatatataaaaatcttaacatttcaatatgtagtccttataaaaatcattattgagatattttacatccttcaaaaaaaattaaggccttaaaatctgttatgcatttcagaacgttcgattcaaactttgccactttcaggtgttcaatagctcatgtagtgactaggacaacataagtagagacattaagtgttaatccagagggaggagtaatcattgtagtctggaatgattaggaaaagtcacagaacttgagttattttgctcattcttttatttactgatttcagtcatttatccacaaatatttgagctcttactgtttataaaaaactagcaaaaaatgcagatatgtcttatctcctcatggacagtgcattaaacagctaattatatacttacttagggctggttgcttaagaagtagtggaaagagtataggcttagatttaaatattccctgtgaaacagaggatggtgataactgcattgtgggattggtgggagtaagtaaaattggtttgtcacatgcctaacactgtgcttgttgttaagtgttttctccttctcctacttcaccctctgtccctctacttccttgttgaatacgtgaggtgggccatgggaaaaaaaggcttaggaagtagcagagtcctgactacccaaggacttgagaatgagttcttaccctcatttcttatcctcagtcgcctttcacgggcctttccagggccctgcttcctggacccagactcaagtttgtattattagtactaaagcttattaaccagtattaaagggattttggcgggctaatttaggaatgtaattattgctttttctagagatttttatctacgtttcattccacacaactattttattaatgaaaatttgaaatgctatctgctaaattagtttgcctcttactcagctaagaatgtgttttagaaatatttcaagaagtgttgatataaaaattattttataccttttttgaaattctagacctaccattaaatacttagcactttggtccatgtaatttttgcattgtatgatatcttggaattttaacatactcttttacagtaagacttgttaggtctagttacattatgtttgagacaataatagatgagtttgttgggaacagttatagtgtattgaacagagtttgttaggagcagtttttatagtgtattgaatactggatttagattgggcagatcttggttttccatttgttagctatgtggttgtaagtacatttgttcactggtttttgattcatacagaagatatagcttgactaatatgctcaggacattattgtgtgtttacttatttaaaaattgtgattaagtgctttgaaggaaaagaactggttactgtgaatatagtaacaggtgaaaactattttagattggattgtcctagagaaggcatctctgaagaagtgaggtttaagctgagacataaaggataaaaaggaagggattagggatgggggtggtaaaagaatattgtaaggaaagggaacatcatgtgaaaaagtcctgaggtggcaaaatgctttgtgtattcaataaactgaaagaagcctagtgtgactgaaggattgtgagcaagggaataatggcatgatatgagaatgaaactagatcttacagggttttgtaaaagatgctgaaggctttaaagagttttaatcaggggaatgagacacaagtgtaactccaaagtggggagttgaatataggagtctctaaaggttgaaagagtagtctggtctacagaaatacatttgagaaccaacagctctcaaatggtaataatttggataaataccatgtatttaaagatctgggaatgcatgagataatctggggagagtatggagacagaagatagaagagaaagggagtctaggaccaagcctagaagaaccccaacgtttagaagctgatagggaaggaactagcataggaggacctcaagtgagcagagttttttggatgactgaggaaatataatggttctgaaatagcaatagggaacaaggaggatgtgattttttttttccaactagatataaacctttatttcacaactttgtcataattcaccttttaaaagacagactgggggacacagctgaaaacactgggaggccagatgctggtgtctttcaagccagagcatagctgtggtcactctagggcccatgtgttcctgtggctctcaggcatcatggaccagatacaccagtactgtccaatcccagttttacttagagccacctccttttttgggggccattagtcctcatttcgtgccagattttcactagaagctccctgttcttccaaaacagttaatgaccataagtaacataccatattccaaagagagctcccccaggatgcactgcatgataaaaaaatttccatcccatgaagatttctgctgtatccatggccataatggcttttagggcattctctgctatgaatgtgaacatctgaagggaaataatggcaagcctcccttctgggatcttagtgcagacagctgcaaagaccatcatgatggtgccagatgcaccaagtgatggtccctatcttcctgtggcaactttacacacataactgacacaattggaaataacacctgcagataataacactgctcttgatccagaatgttcactgtgctggaggcgaagctccacaaaacataagatatttgctgccatgtgaaataaggagaaatgactgaatgttgacagcaacattggaaaagaaagggcttttgaggctggattagatgcgaaatatctgatcattgtccgctgcagagaaggtactctctataaacagaatacaaagacattcatttgcagctgtgataacctgtcatagtctggtggccatcgcttaggttattctaccacttgttaatctcctttctgaagtctcttttttgtgatcttatgctatcccaaccgtcagcttttatatcatcaaaataactctggaccctggatttcagtgattcatattgccaaatagtagctgatccaaatgcacagcctgtaaacccaacagtaaaaaataaagattttatgagagtccctataggatacaaagaaggataaaaggccgtttcttccacaggaggaaccaaagcacttctcttgtatgcttcaccacttgtgcctgtgtctgatctttgaggttcagccttcctgggtgcttttctgaatccacatttttgcgaagaagccaaacctgcgtctgagcagccgtggcggggctagggcctcagtgagttccttgcagctgcggccgcccactggcggagaccacgcctggtcgctgccccaacctctctctgcccagcctcaccaggccatcttcccaacctctgccccaccatggcctgcaaggacatggttttgagacgtgtggaggaactgaataacatcagcctctgtgggatttattaaagtagcatatttgggggagttatgttttccataaggctagaaagtggagtttgctgatcacagaagaggtagagctgaggagctcattcagatgagagggatgtgtagagtagtaggggcatgagagttaacagtatttctggtggagacttacgtaaacaaggatatgaggtgttgatagatttaggccttttaatctcttgtaggctagagggatctatggccttagtggcatagtctggaaggtttcaaatagtttgttgggtaaaggactagtttctcgtgaggtaaatctgtctcagcaggttctagttatggtatgatgaggctccaggctggcctcttcatttcttttatctattaagtagtaataatacctcattaattgttatttaaatggacagtcacatagtgattaataaaagttaagactagataaacatacagccttttacgaaatcttttaaacacacatcccagtcagtcatgctctagccaagttattttcttgtcactcttttctgtgctgaatataacaatgcctaattgaagaataaacattgactatgaatgaggcactcaattcatctctttgctgattatactcaattttagaactaaggataaattattcaagaaatagttgctgattttttagtttgaagtgttctataagcatattggatttttttttagaacccagtgacagtaatacttctttggaaagaatataattgaatatctttttagaactttaagcaaatttatctttaaaacattttatatgctcagtgtagataatttggaaattacagagagatacaaaaaagaaaataaaaatttgcctgtattctcactatctagagaaaactgtttactttttggtgtgtttgtgtagcatttgttttcaaaattgggatcacaatatatagcaatttgtagctatatactctgctttttcatgtaatcttatgtcatgaatattttcctaaaccattaaatattcttggaaaatgtaattttaatgagtgcttaatagtctgttcattgtgagtgtatcatagtttacctaatgattctctgctattggacatctggattggctctaatttattgatatggtaaataatgccttaatgaatatctgtgtaaatcaattattttcttccagtttctttttactttcttttgccatattcctagaaagggaagtactgggtcaaagaatagggtttcatttttgttgctctgctttttttttttttttcctgagacagagtctcgctcagtcacccaggctggagtgctgtggcgtgatcttggctcactgcgacctccacctcctgggttcaagtgattctcctgcctcagcctcctgagtagctgggattacaggcacgcaccaccacacctggctaattttttggtatttttagtagagacagggcttcaccatgttggccacactggtcttgaactcctgacttcaagtggtctgcctgtcttggcctcccaaagtgctgggatcacaggcgtgagccaccgtgcctggccgttcctgctgctttttttttttttttggaagtcttgccctgtggctcagactggactgcaatggtgcgatctcagctcactgcaacctccgcctcctgggttcaagtgattctcctgcctcagcctcccaagtagctgggattacaggcgcatgacaccacgcctggctaattttttgtcctgctgcttttaaggaaaattatacttcaagatttcatatttaaaaaccaacgtgggtcgggctcggtggctcacgcctgtaatcctagcactttaggaggccgaggtgggtggatcactcgaggtcaggagttcaagaccagtgtgactaacatggtgaaggcccgtctctactaaaaatacaaaaattagccagatgtggtggtgcgcgcctgtaatcccagctacttgagaggctgaggcacgagaatcacttgaacctgggaggtggaggttgcagtgagccgagattgccctctagcctgggcaacagagtgagactccgtctcaaagaaaaaaaaaaagagtgtgtgtgtgtttgtgtgtgtgtgtgtgtgtgtgtgtgtgtgtgtgtgtgtgtatttggcggtatagcattgcttatttctctgtttccagcagtggtttatttttgtgtggatttgcagacccccttgcggtaataaatccttacaggttctctttggcttatatgttgagaacaactactatagattataaactacctcagttctctcccgtatcctttgtttcgctgctcttgctccagcagataccttctcattgcctctaacaaataactctttctcctttattcagtgattgttttttcctagcatcccttgcttgatatttggggaaagttttaagacttttagaaaatcgtgtttgagagcacctggttttattgtatcgcttgttagccttgagtgtttattttttaatatttgctgatttgtgagatgaaatatgataggtatatttgggggtaggaggaatgtctgaaatacattttctttcccaacttatgatttaataagagctggaaggagaaaagtaagctataaaacccagtatttgacattttatcctcttaatctggctaccgtccatcatactttcagagctgaaagggctttaaatttcatatttatccagtcctttcagtgtacagatagggaaactaaggcctaaaaaggacattgcttgacttcctcaaggtcataagccaaacagtggtagaagtttggcctgttttttcataacttagtgtgttggtttttctacaaacatcttctgcctctctgccgcatgtgtcccccaacctgccttttaggttgactaacttttaggtgactaatttttttctgtttggatgcctggtagactcttttttatccttgagtttaaccacagtactttgatcatcctgagtcagttcttgcatacattgtacctttttgtcctgcagatatagtgctctcaatttcaaggaaagtttcaacgaaattttctattcatgtgtggcatctacttatggaacaataattatccttatattggatcatctttgttcttcatatttgctatcttctccagaattacttcaatctcttaagtgattccctctgcattcactattatgatttcctttcttccctgccattaatttttcactgtgtttttttctgttctttgctgtttctagtttattagatctctgatgttttgttctgctaagaacaaactgagaactgttgtaggctaaaaaacagccctccagaagatatctgtcacccaggctcattgcaacttccgcctcctgagttcaagtgattctcatgcctcaacctcccaagtagctggggttacaggcacccaccaccatgcccagctaaatttttatatttttagtagagatggccaggctggtctcaaactactggtgtcaagtgatctgcccgcctccgtctcccaaagtactgggattacagacatgagccaccacacctggcccccagaagaatcttactatccattagcagtcactccccatctcctgacacacactgcctgctttagataaccaggtagattagtgagtctatcttctttctatagatttgcttattctgaacgtttcatgtgaacaggatcatacaatgtgcagtcttctgtgactgtccacttattttcagtttgttaaactccttcaagatctttctttttacatgccttctgccattaatgttatcgcttcccactccattgcttccctcctccccctaccctctcacacatttcagaatttcagctgaaataccactttttcggagggacctaccctgattggattctagatactccattatggacttaattgtaccccaccattctcttttgtacctcttacttcagttattatctaatgcagcagttatttgtataaatagtatctgcttttctcatgaggtagggagtttgttgttgttttgataaatacttagatgaacatattcaggcactttacccagtgggaggggaaggaggttttcagagaagagagatatgtgtacgtatgttaactattaatgtagcaatgaaaatgtaagctgaaaaaatagaaaattagtagttaactaggctgtatgtgtgtagactggacaggtaccataaagaatgtcaaagaatgtctattatactctcccagaaataccatgaatctggaattgttttttttgagacagggtcttgctgtgttgcccaggctggagtacagtagtggctccagtagtggagagcatacatggctcactgtggccttgacctcctgggctcaagcagttctcccacctcagccttccaagtagctgggaccactggtgtgtgccaccgtgcctggctaattaaaaaaaaattttttttgtagagacagtatctcactatattgcccaggctggtcttgaactcctgggctcaaacagcagtcctctcacttggcctcccaaagtgctgggattataggtgtgagccattaaaacctaagactgttaagtgccagcttaatttttggagtccatttatgttgttggttagaatatttggaacatttaccctacctgaaaagttgaataaaactgatatattctgttttaaatttggattcatcagttcagtttttcaagctcatttgtaaataatggggcatattgcctacgcgggtcacaatttgtttcaggaaggtgctgcatcatctgctttgatggagatcttaatgaaattggctgctcttgacctctgagattgaccatttcttcatcttttcatggtacctagattgtcaggtacactgttctcttctcccttagtgtttgctttactctttagtggatattggagatacctaggacaaaggtttgtgacgagggtgtgtgtatgagggtcttaagataagggaaatggtatttttcttcttgattaaatttaaggggcatcatgaaatttaagtaacaccttaagagtaataggtcagatggctttttgttgatattattgatctataaagttattgctagcactgtgtttaccatattaagtattaaaaccttatattctgtgggactcttcacatgggtatttagtttcagtttttataatggaaattggtgagaaaaaaggatgactctacaaatttttgttttgtagttaacttttattacaatttcatctaggatgcatgaaagtacatggaatttaggggcagtgttggacataaccttggagggacccagctcaggaaagtcttcagtggaacctttgtcttattatttgcatatattcacatcaaacccttttaaagtttccactgattttttttttttttaaatgagtatgtgttcaatgcttctgcaggttgtagaggtatggtataaaaaagaaattcaccagcagtcacagctagcagacttgggctagtcctatcctggtatatcattaagtcaggtagttaacagtaggagatgacaaagaccatttaaaaaagggcagagttaggcatgtacatatttcccaaggatgaaagttctgtttcaagggaaattgtttcctactttaatgtccttatctacttttgacactgcgaataatgagtaagcactgtgggagacactctgctttggcatcggatgtcctaagacattcttccatgacccaccaataagaggattagtctcattttatttctcaggcagtgataaaggaaccaagtcccagttgtagacccactgtgagtgcaggattattccagtgtcttttatttaatagagccagttagcatctcttctagtagagctttgtggggagaaagaaatgctaagtggactgctttgtgaattgacccacttaatctgacagtactcttccgccttgaagaggtggacttggacttgccctatttgaatggcattgccaggttctctaaaggccggtctttttttctttcatttctttcttttcctctctctctctcttttgtggggagaggattgggaggtgttaagcaagtttttagagggaggaagataaggcaaatacaaaaaccaatatggatttgattataagtaactgtaatcagttaggacaatgttatttaatatgtgcataccttgacaatattgtgggtttggttccagaccaccacagtaaagcacatcacacaatttttttggtttcttagtgcatataaaagttacgtttgcactatactgtagtttataaagtgcagtagcattatgtctaaacagccttagttaaaacatcctttattgtttaaaaatgctaataatctgagccttcagcgaatagtcatctttttgctgctcagtgttgatggctattgactgattagggtggtggttgctgaaggctagggtggctgtgccaattgtttaaaaggagacaaccatgaagtttgctggattaattgactcttcctttcacggaagatttctctgttgcatgagatgctgtttgatagcgttatatttgtttttagtttttaatagagatgggtgtctcactgtgttgtccaggcaggactcaaactcttagactcaagtgatcatcttacttctgcctcctgattagctgggactacagtagccagcaccccaggcattatagcattttacccatagtagaactttcaaaattggaatcagtcctctcaaaccctgctgctgctttatcagctgagattatatcctaaatcctttgttctcatttctgcagtagtcacagcatattcaccaggagtacattccatctcaagaaatcactttctttgctcattcataagaagcagctcctcatctgttcaagtttgatcacaagattgcagcagttcagtcacatcttcaggctctgtttctaattctggttctctttctatttctaccacatctgcagtgacttcctccactgaagttttgaactcctcagaatcatccaggattggtatcatcttccaaactcctgttcctgttcctatgaatcatgaatattctttttttttttttggagatggagtctcactctgttgcccaggctggagtgccgtggcgcaatctcggctcactgcaacctctgccctccgagttcaagtgattctcctgcctcagcctcccgagtagctgggattacaggtgcccgccaccatgcccggctaatttttttttttttttttgtatttttagtagagacggggtttcaccatcttggccaggctggtcttgaactcctgatctcgtgatccacctgcctcggcctcccaaagtgctgggattacaggcatgagccaccgcacccgctgaatcatgaatattcttaatggcatctagaagttgtttagtgtagttatcttcatcagtggtcttagctaaatcttctggataacttgctacagcttctaaatcagcacttactgctttaccttgtacttttatggtatggagagggcatctttcctctgctagcttcaaacttggcagccttccttgaaggcttctgtcggccttcagagaattgaagagggttccggccttgctctggtttaggctttggcttaaggaaatgttgtggttggtttggtcttctatccagaccactcagactttctccgtatcagcaataaggctgttttactttcttgtcattcatctgtttactggagtagcacttttaatttccttcaagaacttttcctttgtattcataacttggctgtttggcacaagaagcatagctttcagcctatctgggcttttgacatattttcctcactaagcttaattacttctagcttttgatttaaagtgagagataggtgactcttctctcacttgaacacttagaggccactgtaggcttattaattggcctaatttcaatatcgttgtgtctggaataaggaggctgaggagagggagggagatgaggaaacaactgattggtggagcagtcagggcatacacaatattaatctattaagtttgccttcattgatcacagatcaccataatgggtataataatagtgaaaagtttgaagtactgcaaaaattaccaaaatgtgacacagagacataaagtgagcatatgctgttggaaaagtgacactgatagacttggttaacatggggttactataaaccttcaatttgtaaaaaaacataatttctgcaaagtgcaataaaatgaggtatgcctatatatttttctcttaggcatgttccttattatattaactataaacagcatcattactaatgaagttgtaaactagaatttaatcagtatttgaaaatgtatggtgtcccttgcagaaatggaattaatgacaaaactcgtagttattacctgctattttattttccatagttaattttaagaggttcttataaagttgtttggaggtactctatcttcgcaacagttaaaattgtaatattttaggcatatctcctcctcctattttgttatacagaaaagctttagctgataaacagattgcattctaaaagttcataaactattttggaacttagaaagtattttttcatagtaagtttagtaaatatgtaaatgcgaataggttcccaggctatcctacaaaagcctagtgaagccatagttagctcaaatatctacatatttacagtgacacataatagaaaataatatggcaagaatagtagttaacaccagaacactgttaagaattagttttgaaaaattttcttctatgtgtgattgatacagggatttaatcagagggaggtcaggcgtagagacttgcgggagtctggcaggcctttctgtgtcctttcaggtactttataggttgctggcatttctttgttttgatattggtatacagcagaaatgctatctttttgcttaccggctatggttaagattgtattttaggttctgagtggaatgaaaatggtagaaaagaaattgtttcctcaggtaaaaaagataggaaagaacaatggaagacagagtaacctaggatgtgtgtttgaaaaagaaattgtttgagatagatttcattgacacacaaataatgcaggtttaagggaataggggtagagtataacatgcaaatgattcctgatggaggagagcaaaggtgttgataaagtgttttgggttagcaatccttatgctggtcagtaagtggttttggatatctttggaagctatttagaactgggaatggggagtagaatgctactatggtatttttatatgaactgtttcagtattttttttttcataacatggtacatcagctcaccaaaaatatttaaatagcttgatatacatttggagtgttttttgatgtattaaactattattaagaaaatatattttttgaatgtatgaaaagtaaaagtaaaatattgtactttagctaattcaacagatgcctaaaactattatgtgatgagagagatttggtttttacattccttttttttgtttgtttattgattagaaaaaccatgcttcctttttcaatttccaaaatgtttcatatttagaagaaagcagtccaaaaagaaaatcaggaaatgttccttctattcctacaaaagtagcacctgttgttaggctatgtattattacttagtattgtgataaatctgttgaagtgtttaaatgtttgctatctgttcactgatgtgatttgcctcgggaatttctggctctctttttactcgttttagatgatttgtctctcaggtagctttgtatatcagcaaaatgacacagttttatatttaaaggtatttttgcagtttatattagaagatgtaaagactcttactcaaaatgtgtggttatattggaccgagttatttttatggatttattttagaatgtaaattattcaattcactttcacttttataagtaatggaaagtatactaaacttaggaattggatgaggcaatttggatgagtactataagactatagtatagtttttaatactacacagtctaaactgtagtgttatactctagtttttaatactatagagtcattgctgttatacatggggcattggttccaggaccactgggcacatcaaaatctttgcatattcaagtcctgcagttggccctatggaaccaccgtatgtggaaagttggccctatggaaccaccgtatgtagaaagttggccctctgtatatgtgggttttacaccctgtgaatactgtacttttaatctgtgtataagtggacctgcgcagttcaaacccatattgttcaggggttacctgtatataaccttgagcaattttacttattttttgagtctcagttcccttctccctgatttagtactggttcttcctcctttgtaggactgttgcttggatcaaatgagataatgggtctaactgtgcttttaaactgtaaagtgcttcacaaatttatttgtgatgatgagtgatgatggtttggtgatcatgattggtcctagggaaaactgtcaaatatatgaattttaactgcattatcttctcaatctgttgaattgacttcactcttttaagagggtgattgcagggtccgaggtcatctctgaggaggaagtagaggtatttattttggtgactttcagactttagtttccaaagtatagtagaagcctgtagaaatttgtcacttataaatgaacaaatattttttcagactgctatctgcatagtcataaaatgggacgcccccagtgtgtgataactgtaagtgttgccctcatggattgggtattagttgttaaatcgtaattgataaagtatgtaggactgacttagagtaagcagtagtcttctgggagaaagcaaatcctgtcctctctcctcccctccctactgttttaattcaacagcaatttttgatttaataacctccactttaaagtgattaaaaatgtgtgtaaatttgtatgctgtgctatggaaaaagcagtttggattaaggagtgcagatatctgcatatttcaggtgagggcagggttggataagctgttatattgggggcatttgggttgtcagaatgcaatattgaggaccaaagggatgtctagtaggccaagaacagacctaattgatttaaaaaatatatttagagcactgatctggtattactgtcactaaagattacagtaaaatataccagctttttgagatctattttctggctttcttctggctgctcaaggttgatgtttctagaatgtgaccactgactggatcagtgagtgagtaattgtatttttaaaagtaattatttacttctttagtttaagtacttaccattttctcttttcatccatgtatagcgtactaattctttgataatctggtaaccttccttcttaagaaaaatttaaatatagtgtctacccttgccctccaaattgggcagcttgtaaatcaaacggataagcgtgtttttaagagttaaaaattctaatgtaaattcctaaaagccaaagatttttatgcacatgctgtaagccttttagacgtgtatggaaaataaacctgtttctaaattacgtcttgaaattatttcaagtgaggagttaagaccaagtgaaatatttattcactttgggtttggtttgattttattccagttcagtgaagttagagaaaaggaaaatacacttgattccagtttatggcttacaagtaaaataatatttaagttcagactgttgaaaattagcatgtttctgattttaggtttattgtttggtttaaagtaaaatttggttttgaggtaaaaccaagaagataaaaaattgagtcaattaaaattggctcagaagaagtatggatatttcaaagaaaaaattggagtggctaatagatattggcctcagcaccttttgtaagatatttggagttttaggttttgctgaacacaaaaagttggtttcagggcctaaatacccatctcttatatttatgacatggtccttagcaaagtaatgtagtaggacacgagtttttcagtaaatggacaggtctgaatcctgtggatatgagttgttgaagggattactttgagcaaattatcaaatctttttgaacaccgtaaattttcccatttgttaaaatgagtgttctgagtatgtcacaggctttttgtaggaattaaatggtatattgtggctcttcaagtgtggtagctggacctgcattaagaagcatttgaggtgcttattaaaaatacagtttctggagccccacttcagagctactgaccttttgggggatatattctagggtcttcattttagtaaactcccaggtgattcttatgcccactgtgagtggtgcttgcaaactgtaaacagttctcaaggaatatgcttacataaattgaacttaagatctcagttttgtctcctgtccagtttttgccaattgctgcatattgatgctctaaagaaaccagaattatttggaaaagggttaggaacagagtaaatttcccacccatacctaaatacacatgtgggacattgagtcatttgttttggctgcttgttgtcaccatgttttcagtaagccctccattctgttttactacttgtaaggcttttctatatatcttctccccaggaatttatatctgaccaatggcaagcataggaagacacaaaagcactacttaggtttaacatgaattagtcagttctcaaatcctaacaattctgcttgaataattcttacaaagtctgtggcaaacctttgctgagcatttgcattgtgctgaacctagtgcacatgggaaatgtaaatgattccaataatgtctagttttttttttttttttttttttttttttttgagacagagtctcaccctgtctcccaggctggagtgcaatggcgtgatcttggcttattgcaacctccacctcctgggttcaagcgattctcttgcctcagcctcccgagtagctgggattacaggcgtgcgccaccatgcccagttaattttttgtatctttggtagagatggggtttcaccatgttggccaggctggtctcgaactcctgacctcatgatccacccgcctcggcctcccagagtgctgggattacaggcgtgagccactgcgcctggccaatgtctagtttttctaagagctcttagtgaagtaaggggttcagacttttaattatagggcattgtgataagtaccgtgatagggcacatgtgagtggtaaaagagcatagtggagcagaataatatattctttcctatttccactgctaataatttgaagttcaaagaaactgtaatttattgagcacccactaagtggcatgcatttaaaaaacaacaactgtgtaacctgtgctattcaagtgtcacaaccctaagtagcagctatttccattttatagatattaagtaggttgaacttgtgatataaacctttgtatgacttcaaagcccatattcttttcattaggcctctaaggacaaaatttgatttttttctttttaaagaaggggatgttatgattcttcagaattgatatctgttaatttcagtagcatgatgtcttcctgtgattgaaaagaactctggagtctttctgtcatctcttgtcctctgccaccctatgttttccttttcatttctaaaagtgataaacaagtaaacatctccggaagccagcctatgtgacatctgtccattttgttttctctgcctctccttttatttactcttcctatccccaaaggaaatttagtaattgttttttttgttttttctaatctcttaggttagaatcatgtgaagatgaatggtatctaagggaaaagaccttgttagaaagatttttatcacatgaagtttacatagaaattgccctggaatttttatcctgctgttgatcattagggttgatttgattgattcaactgcttggttgatatttcctttctttcttcatagtttcatttgttccaacatatataagcagttgtgcactctggctagagcttccgcatcataaataaagcccctattttaatcacaagaataagttcatttttgaattttctaactctgatcccatggggctcagttttctactttttattccctttgctaattaatttttatgttgttttcttgtttctagcagtttgtttattttggggagaacatctttgctttttaaaattaaatttattttatttaaaaataaatagagacaaagtttcactatggtgcctgccatggcctcccaaagtgctgggattgcagatgtgagccactgtgtctagcccaacatctttgttgttgttgttgtttgttttgtttttgctttttttttttttttttgacagagtctcactctgtctcccaggctggagtgcagtggcatgatcttggctcactgcaacctccgcctcccgggttcaagcaattctcttgcctcagccttccaagtagctttttgtacttttagtagagacggggtttcgccatgttggccaggctggtctcgaactcctgacctcaggtgatccactcaccttggcctcccaaagtgctggaattataggcttgagccactgcgcccggccaacatctttgttttaatagttttttttttttttttaaacgtggtttctttggataaagagttgaacttcaacttaacctgaaaaatttacagtggccagagtttcctcttctgacagtcttatgtaaacatcctttaaaaatagctgtgtgttatttctctacatgatagagaaataattggcagtgcctttccctctgctaatactattgttagacagaaaatgtcatgaaaatgctttgtatcttctgtgtattcatgggcggtgtgctgatttctctaggcttttgttgcagacttttaattttctgttatttctacgtggagacttcattcttgaggtgaaggaaaatttttatagaggcagtcattgcagacttaactctccacagcaaggtcaccagagtatttattagactgtggcatgacttttctcagtttgtagtacaccttattcatattctctaaaagcacctcagttacaaagtgtctcagttgttgctttttctcagcactggattttaagaactagtctccttaaaacaagaaacatcaaattaaatgcctttgttaaatgaacaaagtatgttcagctttgagatttatcatttgaataaaattagagtgtcagtgccagacacctacctacgaaatatttaaacatccttgaagtggacttttggcttttggatactccctccataccttggatgggtccatgtcaccgtattcatcgtggagtggattggtctgaggagtgacttgagaagacttcaaaaaatatgactacaaaatgttgtttacaggtacaatcctgtttttaggagattgagaactaggctgtgtgtattattttgggatatgcctaaaccgccaaggcttttgtaaaaattgtattctagactggatacagtggttcacacctgtaatcccagcactttggggaggctgaggtaggatgattttagacttaaggccaggagttagagaccaacctgggcaacaaagtgagaccctgtctctccaaaaaataaaaaaataaaaaatattagtgaggcatggtggtttgtgcctctagtgttaactacttgggaagctgaggcaggaggattgcttgagcccaggagttcagtgttacagtgagtgagctatgatcacgtcattgcactctaacctggacgaccctgtctcttaaaaaagaaaaaaattattctgtatttaacagccttcaatagaaagtgattgttctgttgtataccgtcttttcattgcgtcatgaggggtctattctggtttatgtatttaagatttatctattatggtaaagagtagggatttaatgctgtgttttaattatgtagggaatttgtacaatgtgagtgaagtcctctgacgggagagagggcctgaagctgaactagttcctgctgctgtgctgttgtaccttcaaggcggtttcgaagaccaattttattataatcgctagtgccatataattagtttggaaattactgtttcatgtatgctaggaaatttagtactgggcaaagtggttattttttgtttaagcagatttgttacagtttctagtttttcttgaggattttggtctcttggaagcagtgctatggtctgaaatagcccaatttgttgtagcaaatattaagttgtttggatgtcacagaatcaactgttgtacagttttatttttgatatggttttgctttggtataaatttcaaaacctaatgttgccaaagtgtctctgggaatagatgttgatattaaggagtacatggttgaggccagaaaactataaaagcctgttgatttattctcttacttcctattactctggagctgatccttttacattatgttattggaaacattatcttctttttttaaggggaaatggagaaaagaatatgaagttagtggtagtgggaaggttttaaaatacagcagaggcagcacgaggcatgcgatgagttctgctacctaaagctttatgataaattaatctattataggtattaatgtagatgaaacaatgaatgggattgttctttgtaaacagtacaattttatacagttgttatcttattgccaagttggctaattccaatgccaaatggtaatgcgcttttccttggcacgctagttgctgaccgacccatggcactactaatgttcatgccaagtcatcccccatattgccctgccattcttttcagctctgctatttatcttttaattactgctaaggtagtaagtaccttgtctctagatgtgcaaaagtgtgaaagaattggtccttgtctacatcaaatctcagcttaaaattaagaggccttaagagtctctttcagctatagtatctgtaggacctgttttacctttccactctgcttttaatactttagcagaattgtcttatttgatgctttttcccatttgcaaattatgatgctgggatagacattcctaggctcagtggctggagtgaagagatgctaaatcccagggttctaatggatatctatcatagctagttttcaaacccttgaaatgttaccttttttaaaaagaagtagaacctgtggaggcaaatagggaacgtcatcacaaatgcttatattgcttaagttctcttactagagcaaggaaaatacaaaggtggggctcctgtttcctttattgaaatatggttatgcagtagaaaaacataatttttggttggaccccagacagtttttgttttccgtttttcagttaattaaaattgtggagtacagtaggctttttgtgttgctgttattggaaatggtcttgctgtgttgcccaggctggagtacagtggcatgatctcagctcactgcagcctcccgcctcctgggttcaagggattcttgtgcctcagcctcccttgtagctgggattacatgtgtgcatcactgtgtttggctaatttttgtatttttagtagagacaatgttttgccatcttggccaggctggtcttgaactgctggccttgagtgatccgcccaccttggcctcccaaagtgctgggattacaggtgtgaactaccatgcctggccatttatttatttatttatttatttatttagagacagggtctccctttgtcacccaggccaaaatgcagtggcgcagtcttggctcacttacaggcatgtgccaccacactcagctactgttcttaaaatctatattagtttattaatgatcctttgttttgtgagttagatgtgagattttgcaagcaacttgttcagtggaatttttaattcagagtcctcgaaatctttttttggtgttacagttttgacttggataacatagggaagagtcagactatgtttgaaataacgtatgctttttatgttctcttgagacaattggattgtaagaatgcattcaataccttggattttaacctttctggatctcttcatttagagtttaagttcagaagactgtgattctgtttttaggactgctaagatacaggtaaagaaaagttattttacaaatgagggagagaataacttatgataaggtttatagtcagcttgaaaagttgtagttaagattagcatagaattttggggggtggggcatgataatttagaactcagattaaactaggtttttagcaaatatacctaaggtttattttactgagggatgagacttgaagggagagtttgaaagctttgaaaactgctttttttatattggcttatgctggggtttgtgtgcatttaaagcatatataatactgctgtaaataaaaatggtggtgctgacaagatttgagttctttcttttcacaagtggttttggatttggggtgattaaatcatgccagtttgagtgttttaccttggacctaaagacataaatattcaagatggctggccatgataaatatagactgcctgtatttcacctggctatcttatgaaggaatccctcattgcttttgaatctgtcatgagtgccatctttttttttaattattattatactttaagttgtgggttacatgtacagaacgtgcagttttgttatataggtatacatgtgccatggtggtttgctgcacccatcaacccgtcatctacattaggtatttctcctaatgttatgtctcccctagccccccaccccccacagaccctggtgtgtgatgttcacctccctgtgtccatgtgttctcattgttcaactcccacttatgagtgagaacatgcggtgtttggttttctgagcttgtgatagtttgctgagaatgatggaatgatggtttccagcttcatccatgtccctgcaaaggacatgaactctccttttttatggcggcatagtattccatgatgtatatgtgccaaattttcttaatccagtctatcactgatggacatttgggttggttccaactctttgctattgtgaatagtgccgcagtaaatgtacgtgtgcatgtgtttcatagtagaatgatttataatcctttgggtatatgctgagtaatgggatggctgggtcaaacggtatttctagttctagatccttgaggaatcgctacactgtctttcacaatggttgaactaatttacactgccaccaacagtgtaaaagtgttcctatttttccacaacctctccagcatctgttgtttcctgactttttaatgatcgctattctaactggcatgagatggtatctcattgtggttctgatttgcatttctctaataaccagtgacgatgagcattttttcatatgtctgttggctgcataaatgtcttcttttgagacgtgtctgttcatatcctttgcccattttttgatggggtcgtttgcttttttcttgtgaatttgtgtaagttctttgtagattctttatattagccctttgtcagatggatagattgcaaaaatttttctcccattctgtttcttttgctgtgaagaagctctttagtttaattagatcctatttatcaattttggcttttgttgccattgcttttggtgttttagacatgaagtctttgcccatgcctatgtcctgaatggtattgcccaggttttcttctaggatttttatggacctaggtcttaacgtttaagtctttgatccatcttgagttgatttttctataaggtgtaaggaaggggtccagtttagttttctgcacatggctagccagtttttccagcaccatttattaaatagggaatcttttccccattgcctgtgcgtgtcagatttgtcagagatcagatggtggtagatgtgtggtggcatttctgaggcctctgttctatccctttggtctatatatctgttttggtaccagtaccatgctgtttggattactgtagccttgtagtaaagtttgaagtcaggttacatgatgcctccagctttgttcttcttgcccaggattgtcttgggtatgcaggctcttttgtgtttccatatgaaatttaaagtagttttttccaattctgtgaagaaagtcagtggtagctataaattactttgggcagtaaggccattttcacgatattgattcttcctatgcatgagcatggaatgtttttccatttgtttgtgtcctcttttatttccttgagcagtggtttgtagttctccttgaagaagtccttcacatcccttgtaagttgtattcctaggtattttattctcttagtagccattgtgaatgggagttcactcatgatttggctgtttgtctgttattggtgtataagaatgcttgtgatttttgcacattgattttgtgtcctgagactttgctgaagttgcttatcagcttaaggagtgtttggcctgagacgtcaaacagagacaatttgacttcctctcctcctatttgaatatgctttatgctttttcttgcctgattgccctggccagaacttccaatactatgttgactaggagggatgagagagggcatctttgtcttgtgccggttttcaaagggaatgcttccagcttttgcccattcagtatgatattggctgttggtttgtcataaatagctcttgttatgttgagatacgttccatcgataccaagtttattgaaagtttttagtatgaaaggctgttgaattttgttgaatgccttttctgcatctattgagataatcatgtggtttttgtcattggttctgtttatgtgatggattacatttattgatttgcatatgttgaaccagcctgtcatcccagggatgaagccgacttgatcgtggtggataagctttttgatgtgctgctggtttcgatttgccagtatttcattgaggattttcgcatcagtgttcatcagggatattggtctaaatttctttttttttgttgttgtgtctctgccagatatcatttggtatcaggatgatgctagcctcataaaatgagttagggaggattccccttttttctattgattggaacagtttcagaaggaatgataccagctcctctttgtacctctggtagaattcggctgtgaatttgtctggtcctggactttttttggttggtaggctattaattattgcctaaatttcagaacctgttattgatctattcagagattcgacttcctggtttagtcttgggagggtgtatgtgtccaggaatttatccatttcttgtagattttctagtttatttgcgtagaggtgtttatagtattctctgatagtagtttgtatttctgtgggatcagtggtgatcccctttatcattttttattgcatctatttgattcttctctcgtttcttctttattagtgttgctaatggtctattttgttgatctttcaaaaaatcagctcctggattcatttatttttttttttgaaggttttttttctgtctctatctctttcacttctgctctgatcttagttatttcttgtcttctgcgaggttttgaatttgtttgctcttgcttgtctagttcttttaattgtgatgttaggatgttgatttagatctctcctgctttctcttgtgggcatttagtgctctaagtttccctctaaacactgctttaaatgtgttccagagattctggtatgttgtgtctttgttctcattagtttcaaataacttatttctttctgtcttaatttcgttatttaccaagtagtcattcaggagcaggttgttcagtttccatgcagttgtgtggttttgaatgagattcttaatgctgagttctaatttgattgcactgtggtctgagagacagtttgttgtgatttctgttcttttacatttgctgaggagtgctttacttccaattatgtggtcaattttagaataagtgggatgtggtgctgagaagaatgtatattctgtttatttggggtgcagagttctgtaggtgtctattaggtccgcttggtccaaagctgagttcaagtcctgagtatccttgttaattttctgtctccttgatctgtctaatattgacagtggggtgttaaagtctcccattattattgtgtgggagtctcagtctctttgtaggtctccaaggacttgctttatgaatctgggtgctcttgtattgggtgcatatattttaggatagttagctcttcttgttgaattgatcactttaccattatgtaatggccctctttgtctcttttgatcttcgttggtttaaagtctattttatcagagaccaggatttttttttgctttccatttgcttggtagatctttctccatccctttattttgagcctatgtgtgtctttgcacgtgagatgggtctcctgaatacagcacattgatgggtcttgagtctttatccagtttgccagcctgtgtcttttaattggggaatttagcccatttacatttaaggttaatattgttatatgtgaatttgatcctgtcattatgatgctagctggttattttgcccattaattgatgcaatttcttcttagcatcgatggtctttataatttggcatgtttttgcaatggctgctaccggttgttgctatccatgtttagtgcttccttcaggagctcttgtaaggcaggcctggtggtgacaaaatctctcagcatttgcttgtccgtaaaggattttatttctccttcacttatgaagcttagtttggcgggatatgaaattctgggttgaaaattcttttctttaagaatgttgaatattttccccctactctcttctggcttgtagagtttctgccgagagatctgctgttagtctgatggccttccctttgtgggtaacccaacctttctctggctgcccttaacattttttccttcatttaaaccttggtgaatctgacaattatgtgtcttggggttgctcttcttgaggagtatctttgtggtggtctctgtatttcctgaatttgaatgttggcctgccttgctatgttggggaagttctcctggtgaatatccttaagagtggtttctaacttgattccattctccccatcactttcaggtacaccattcaaacgtagatttggtcttttcacataatgccgtatttcttgaaggctttgttcatttcttttcactcttttttttctaatcttgtcttctcgctttatttcattaatttgatcttcagtcactgatatcctttcttctgcttgattgaatcagctactgaagcttgtgtatgcttcaccatgttctcatactctggttttcagcttcatcaggtcatttaagctcttctctacactgtttattctagttagccattcgtctaaccttttgtcaaggtttttagcttccttgcaatgggttagaacatacttctttaacttggagaagtttgttattactgaccttctgaagcctacttctgtcatcttgtcaaactcattctgcatccagttttgttcccttgctggcgagtagttgtgtttctttggaggagaagaggcgttatggtttttggaattttcaacctttctgctgtggtttctccccatctttgtggttttatctatctttggtctttgatgttggtggcctacgtatggggttttggtgtggatgtcctttgtgttgatgttgatgctgttcctttctgtttgttagttttccttctaacagtcaggtaccttagctgcaggtctattggagtttgctagaggtccactccagaccctgtttgcctgggtatcaccagaggaggctgcagaacagcagatattgctgcctgatccttcctctggatgcttcgtcccagaggggcacccacctgtatgaggtgtctgttggccattactgggagatatctcccagtcaggctacacaggggtcagggaaccacttggataacagtctgtcccttatcgggagctgaaacgccatgctgggagaaccattgctgtcttcagagctgtcaggcagggacgtttaagtctgcagaagctgtctgctgccttttgttcagatatgccctgcccccagaggtggaatctagagaggcagtaggccttgctcagctgtggtggtctctgccgagtttgagcttccctgctgctttgtttacactgtgagcatagaactgcctactcaagcctcagcaatggcaaacgcccctccccccaccaagctcccacatcttaggttgatctcagactgctgtgctggcagcgaacaaggctgtgtgggcgtgggacccgccgagtcaggcatgggaggggatcttctggtctgcctgttgcgaagagcattgggaaagtgcagtatttgggcaggagtgtatcgctcctccaggtacagccactcatgccttcccttgggtaggaaagggaaatcccccaaccctttgcacttcccaggtgaggcaatgccccaccctgcttcggctcgccctccatgggctgcacctgctgtccaaccagtcccagtgagatgaaccaggtacctaagttggaaatgcagaaatcacctgtgttctgcaaagatcttcctgggagttgtagaccagaactgttcctattcagccatcttggaagcgaccatgaatgccatcttacaaatgaaagtgttaattggtcacagacattcactggcttttgtgtatattaatacttctgtgaatttaaatggatataaatattggttataatattccactagtgcatttggatattcatttatctagcaatttatatttcacagagaaaaatactcataaatattatattacttttcttttattaggttaattggaattcagttagtattttagaaaggaaattgtaatggaagaataacaggaaaaaataaaagtccaataagtgagcctaaggacttatattgtactgagaattggttttagatttgtcagggaagagagaagaaacagtagacatttttgtgtacgttgaagtcactaaaagaacaatgtaaagctcttttagatcagatactaggtagcataatacacagaatcgattaagaattcagaaaacaagatggtgactgtggactatccctagtgaagtaggaggtggctcttgtgcctgaattgaagagagccgttggattgctactggggtgagagaaggcaaaaaaggaaagaagaggtctgtgagtgaatagagaccctggagccagtgatatgcttatataattgggcctcagttcagaatgggttggattatttaaatttttatatctgttaaccccaaattaacattcttttctccacctgagctttctctgagaggtcttctactttgctaaaaagaagattcagggaagcaaacactcaaagccttactttcctaaatgcagaaggatctgaagagagaagttttaaacatttttatttgcacatattttattttcaagtaaaataaggtcttgaagaaagccctaaggccttttagaattggatggataaggtcagactcttatgggttcaccttttgctatttgaccatgggcaaatttaacattcttcctattacctataatatgggaacagtactgtctacctcatggggttgaaactaagcattgtgtctggtctatagaatgactgaatacatgggagtttaaaaaatgacttataattgaaacaagtaattgaagtaattacatgtaataaactaaaaataatttgtagtaaagaatatagtttactttgaccaggcgtggtggctgatgcctgtaatcccagcactttggaggccaaggagggcggatcacctgaggtcaggagttcaagaccagcctggccaacatggtgaaaccgcgtctctgctagaaatacaaaaattagccagacgtggtggcaggtgcctgtaatcctagctactcgggaggctgaggcaggagaattgattgaacccggcagacggaggttgcagtgagccgagattgtgtgactgcacaacagcctgggtgacaagagtgagactccatctcaaaaaaaaaaataaaataaaaaataaagaatatagtttaccttgtatattttggcagttttctctatttaattccttacagttctcgtgaaaaaaaaatttcctttcttcctttaggagacaaggacggcagcaaggtgacaacagtggtggcaactcctgggcagggtccagacaggccacaagaagtcagctatacagacactaaagtgattggaaatggatcatttggtgtggtatatcaagccaaactttgtgattcaggagaactggtcgccatcaagaaagtattgcaggacaagagatttaaggtaaaatgtccagtatttcatatattttgttgctgtcgtaatacatataccataaatgattatttttttagttgcttctttttgcttcaaatttcttctattgtgcgcatttttgttcagctcaaccattgtagtgattttatttctagtcatgtattttgtagagataacattcactgaagattgcagtattacttttgtagtcattacaaatgacatatgtaatatatgtattttttaatcctgtgaaaggtaagttaaaatttcttaatttatactataaaaagtgacctgtcctcaccgttgtactgtgttgatgtagaccagaggaacactgcctgtagcatataagcattttatgtatttgactatgcttccttttttcaaaaaatttttttaatccatgttgcaacttgtgttagtctgtttttgcatctctataaaggaatacctgatattgagtaatttataaagaaaagaggtttaattggctcacaattctgcaaactgtacaggaagtgtggtgcagacatctgcttctagtaattgtctcaggaaacttctaatcatgggcagaaggtgaagggcgagtaggtgcatcacatggcaagagctgagcgagagcatgaagggggagatccagactttattattattattattgttattactattttgtagaaacggggttttgccatgttgtccaagctagtctcaatctcctgagctcaggcaagtcgcctgtctcagcctcccaaagtgctgggattacaggcgtgagccaccatgcccgtccccagactctcttaaataaccagatctcctgtgaactaactgagtgggaactcactcatcaacaaggggatggtgctaaccccattcatgagtggttgacccccttgatccaatacctcccaccaggctctaccccgtctctactaaaaatacaaaaaattagccgggtatggtggcgggcgcttgtagtcccagctacttgggaggctgaagtaggagaatggcgtgaacccgggaggcagagcttgtagtgagccgagatcgcgccactgcactccagcttgggggacagagtgagactctgtctcaaaaaaaaaaaaaaaaaaaaaaaaggagattacatttcaacatgaggtttggaaagggataaacatccaaaccatattacaacactatccatttttctcgtaactttttttttttttttttgctatcttcccttttttttcttgtccttctgcctttagacactagcaatcccaaaattcagttctcgtcatgtattttcattttctgtacctcattaggggagcctatgcatggaagctcagatgtcatctctatgttgtggtatagcagagagagtcagaagacaccgggtgtaattaagcctctgtcactatgcagcgttgctccctttactactcttccaacctctgcaacattttagtgggagcctccaatgtaccaagatctatggtaaacatgaagggatataacaagaagaagtgatcactgttctggtataacactagttataccacattctagtgtccatctgctgtaaatatctggaacattctaaagaatttttaaaaattcagttgtttttgttttcagttctcacctctcccccaagtactagtctcatgttgtcaaatgcccactggatcttgatatctgaatattgtactgttatctcaaattgtcaagccatcttatctaactatgacttaacttttaagactcaatggaaatctctcctgctagttcccagaactttggatttgccttttctttttaatggttttataattcactgttattcagactgttccatttgctcatccctaatatccagtcattgtttaacttgattttcttttttcctcatactgccttgtggctgtgtctcttctttttctttctcttcactactattctagtcagaacctgtcattatttggcttaaccacttataaacgtgtaccttagtcttctcctttctaatctcttctgtgtactaagactagaataatcccagagttctcattggtcatgttgtttctcttgcccataaatcttctatggttcttcatagtctagaaagtaaaacctgcctagtttacttgtgtacgcagaaacttccatagtcttccattttctccagatacttaactttccaaactttttatgttactctccttgaaatatgttcttctctatgaccactctgcttttattcagctcttctatcactcccattctcctgctgtctaaattctgtgcatttatgaaaactcaggtcaaattcttcctgtatgaaacttcccagatgattcaagtcagctatggagatcttgctattctaaattcctcgagcccatattgtccataacctaggaaattccatattttttatgacagggtctccattttttaaatatttgtctcctaaatacccacacattccattttttgggattggtagttaatgatgatagcagatacttactatatgtattttttgacatgagcagttttacataattcttaccattagtactgtgtgattgatattgttattatttggataaggaaacctaagtacaaagaaattttaaattaacttgtcagggtcacacagttggcaagtggatggatgagcaaggattcgaatctagacagactctccagtgccttaccacattttatcctcgctgtatcaagcccctctaccccttctctctttctctcacagtattcatcctctttctatatcatagtatcagattctcacagtgtcataacctctttctatcaaaatatttaaaccacaccctctttctccttctcaagagagattggttttatttcattctctaatggttgcattatattttattgtgtggatataccctaattagccattgttcaattgatagctattaaaatttttttccctgccaaacattgtatatatgtgctttatcagaatacagtttataaaagtagaattctagggtttaaactttaaaccttgatataggagagcactttaaaccttgatataggctgtcttccagttagattttatccatttaaatgtacgttatttgaatatgagtaatgcccatttcctgtgtagcctttagatattaggagtatttttatgtttttcagttctgtaggtgaaaaattatttttatattttgttactttcttttctgttttaaattttttgtagagacgcatctcactacatggcccaggttggtcttgagctcctggcctaaactggttctccctcttggcttcctaaagtggtgggattatggtctgaatcatcatgcctggccctgaaaaattattttaatttacaacaccattttacatgttgtgaccctttttaccccttttagagtgtgtgtcttccttactcatttgttaaaacccatttaaaatgtaatcttgtagagcaacaaagattttattatctcagtgcttctgtgcgttggaaattcaggcatggcttagctaggaacctctggcccagggcctctcaccagactgaatccaggcatcagctggagctgcagtctcatctgaaggtttgtctgaaggaggaaatatctgtccccaagtgtactatgtgattgttggcagactttggtcccttgccacatgggcctgttcactgggctttctgaggtcttaccagttagcttcctacatggcaagggagccactggaaaaacagtaagcccaagacagaaaccacagttgtttttctaacctaatattggtgagttgattaaacaagggtgtgaataccaggaggcaggtatcatttagggccatcctagaagctgcctccacaataatatgaaccatctgtcatcatctcaaagtgagaaaaaataatttcagtttgtgttgactttgcttgtgatatcttttgcttttcagatattgttgatttgggctttggtataatgctgagaaagggcctgttctatcttgcttataaataatgtcgttttctctaggaattttattttcacatatttctttaatttttctggggttatattttgggatgtagtgtaaagtagtaatataacttaacctttccccaagtagtaggtcattgtctcagaaaccatttttataaagtttatccttttcccactggtgggcaaatgccattttaaaaaccatgtattatgttaccatatatacattggattttcttctgggtttccttttcttttccgctgatttgtccattttggcttatgtaacacttctctgatgatgagaactaacagcatattttgagtgttccttgttttttctcttaaaaaaatctgtgtatcaaatatcatcagcctgtgatgtttctcctgcaaccccaacaaaacaaaaacaaactttagatttgattaaaattgtgtaaaatttgcagattagttgggcagaatgtgcagatttacaatattcagccttcccatccagaaatgtgataattctcagcatttaatccatttttgatataaaactttatagttatgtacgttttaaacttttcttacttttttaatctagatatgtgtagtaatttttctgttgctcttgggaatgggagtcttcctccatgtaaatacatcttccatgtaaatgcaagtcttcctccatgtaaatacatcttccatgtaaatgcaagtcttcctccatgtaaatatgtcttgttttaggcatttgaacactgcctcctccgttggttttgaacttgggcatcttctagatgcatttaatgtgctgaggccctttagtagggtactttactatgttgcttttctaaatattattacatgttcattataattttctagcttacctagaaacctgagtttaaaatgttactggtgaactagagtgtttttgttgttttgttttctgttgttagatgaacagtttttattatgattagacactgattttcatatagggtttatggtttttttccctatgatctaaatgtaatatataaacatgataatattcagtcggttttgctttctaataatcctgtttgctccaggtgttttaacattgtgattttttttggaggtattttatgtattagtgctttcttttattttttgtttttctcagtcagacttgctatatagctttgctttagttatcatctcttttcaaggaaccagctgttctacctttcttctaatcattgtatctttcatcactattcctttttaagaaggttctaaagaaagaatatgtcaaatactttgattaaagattgaaaatatgtccctatgtaaatgaactgtagaactctgaaaacaaacatttaaataaaactattaataaacagtgagaccctttctttttttattaaaaaaaaaaacactaaataaaactatttatattgggtagcatagggtaaaacacagtaatacttctgattgtcctcactgggaatttgaatacttttcatgtattacagagaggaacaagtaacctggctgaaaataaaaggatgtgagtcaggaaaataaaataataaagcaagagagcacccaaagccttggcttgcaagaaattgtgtattagatactatggtttttatatgtacttattgacagagaaagtggggatctattgcttaggtaacaaaatagtagatctaatgttttattatgatttttgtccttttttcatgttttgatggagaagatgtacagacagtggtttaagaataacaaacacttgaaacttgcaacttagcctatgctaggattgtgtgggtatttcaccaattaatttaataaatacagagttttgtctaatgagcggtttgaaagtaataatgtgcacacatagcattttgtagtttaaaaattagtttcatatacataaatcatttgatttttgctactttttattttgatataatttcaggcttaggccaggagtggtggctcacgcttgtaatcccagcacttcaggaggctgaggcaggaggatcacttgaggtcaggagtttgagaccagcctggccaacatggcaaaatcccgtctctactaaaaatacaaatattagcaaagtgtggtggcacgtgcctgtagtcccagctatttggaaggctgaggcaggagaattacttgaacctgggaggcagaggttgctgtgagccaagattgcgccactgcactctagcctgggggacagagtgagactctgtctcaaaaaaaaaaaaaaaaaattatttcaggcttaggccgggtgcggtggctcatgcctgtaatcccagcactttgggaggccgaggcgggtggatcacgatgtgaggagatcctgaccaatatggtgaaaccctgtctctactaaaaaatacagaaattagctgggcacggtgactgaggcaggagaatcacttgaacccgggaagcggaggttgcagtgagctgagatcgcgccactgcactccagcctggtgacagagtgagactccgtctcaaaaaaaaaaaataattattgtttcaggcttaacattgccattactgtaaagaacttccttaaaccttttatccagatttccaaatattaatatttatcacactcacttttgcagtttcttcctctctatatatattatttttatttttttcaggtgagatcttgccgtataacccaggctggagagcggtggtaaagtcacggctactgcagccttcaactcctaggctttagcgattctcctacctcagcctcccaagtagataaccataggtgtgcgccaccacacctggctagtttttaatttttttttttttttttgtagagacagtgtctccctgttttgcccaggctggtctcaaactcctgggcttaagtgatcctcctgccttggccttctaaagtactgggattatagacgtgtgtgccaggctacacatattatttcctgaaatgtttgagtgcaacttttaagtatgaggctcttttatccctaaattattcagtgtctgtttcccaaactcaaaagacattcgcttatgtaaccacataataattataaaaaaatcaagaaattaacaattatacaatactattatctaatatgcaggctttattgaaatatctccagttgttccaaaaatgtccattgtggcacaagaaaatcctgggtcatgtgtttagttgtgatatctctagtcttctataccaggaagagttcctcacttattgtctttcatgacattcatgtttttgaacagtataggacagctatttgggtttgtgtaatgtttcttcataattaggttcagcatattcatttttggaaagaatgtcattgaaatgatttttttcttcttaatgcattatatcaggagacccatgatgtctgtctagttaatgatgatattcacttctatcacttagggtagtgtttgctaggtttctttactgtagaattacggtttttctcttcataattataaggaatatgtaggaaaatacttttagactacataaataacctttttctcatccagcttttaccaactagttttagtatgcattaatgagtttttgttagaatcaattattataataatggctacaaatggtgattttctaattctttttttctttattaattagattctactctaaggattatgaggaaagcttttcccttctctcatttaattttatatatcatacggactcattgactctcatttaattgtatatatcatatggactcattgactctcattttattaaatgggttataatctttggtcatttattttgatactcagattgcttcaggccaggtgcagtggctcacacctgtaatcccagcacttagggcggccgaggcgggcggatcacgaggtcaggagattgagaccatcctggctaacatggtgaaaccccgtctctactaaaaaatagaaaaaaatagctgggcatggtggcgggtgcctgtaagggaggctgaggcaagagaatggcccaggaggtggagcttgcagtgagctgagattgcatcactgcactccagcctgggtgacagagcaagactctgtctcaaaaaaaattgcttcagatttggtcagcgaaagccctttcaagctggatctagatccccttagccagtagaactagagaataggtgtatgtgtgtgcacatgtgtgcaagcatattcacacgtttttttctgtatttctttctattaaaaattaatacttttaattgcagagcaacatcacagagttcactctagccttctttatttctatatttgtaactcctctttctgaactgagaaaacctagctgctgttatccacaatatatttacttatttgctcaatcctagaatttacaagctagtttcagagctgctaactcatatccctgggggcagagttggacttactaagagttcactgtttatgttttttatctttagcttgaaaggcatatggattttatattatattcaaaaagtatttgggtttttctttttttttaattttaattttttcctgtagcatagactattaatttgaagtagttaggttcatctgtttctgtatgtatcgcttcttagaacttcaccccctttctttttgattaaaaaaattatttatgttttcattctgtgaaacactaacatggttccaaaagtcagaaatctagtgtcatttcttttcgattctttctattttatttccactcactccctgtagatggccaacctcattatgttctggcttacttttcctcagttttgttttacacatacctgctcgtttgtgcattttctttttttttttttcttccttacacaggaggtagcatattggagacactcttttgtactttgctttttctttaagctatatttcctggcaatcattgcatatcagttcagagatttttttttttttcatcctttttacagctgctaaatgcccctccataaaggttataccaatttgcattctctctagttaagtatgagtgcctgttggtccatagttttggctataaaagttgccttactttttaaatttttgctaatctcataggtgagaaatggtatctcattatagttttaatttacaatcttcctattttgagtacactttaacatcttttcatgtattcaaggtccattttatttgtttttgtgagtctgtatgaattgtcctttttttggtccattttaaaaatgtgattttgatttttcccaatcaaccctgaagagtactttattatggaatttatattaggtgtgatatgtgtaatttttactttgtgtatggtagttttttttttctgatatgtaagagtccttccttccctctatgcagttgaatttattgctcttttatctggattttgtgttatggttataaagctttccagctatcctcaggttaaagaggaagtcatctatattttcctctagtagttatcagggttcagtttttgcatttagatccctgatccatttggagtttattcctattatggtatgaattattgatctaattttatcttttctaaatcattaactacttgtctgggtacaatttagtagaagactatctttgttccagttatttgagatgttactgttattatatgctaaatttctacatgtacttggctctatttctggactttccattttattccactaagctgtttgcatattcatgtgtcactactataccgttttgattatagagactttatagtatgttttaatgtctgatagggttaatatgcccttgtagcttttctttttggtgttttcctacctatttttacatgtttatttttctatatgaactttggcatcagtttatctaactttataaaaaaagtgttgatcttttaaattgggattttatttataaattaatataggaagaactgatatatttgtgagcttgaattatcttagccaggaataagaaatatttttccatttgttcaaatctacttttatgtctttcagaagttttggcttagtcaggctttagaaatttcttaagtttattcttaagtattttattgtttttgttgctattgtatagtttttcttgttttttattctacatgttaaaaagtgatggactgctttataccaagctcggtttttttccttgtatcacccttcctttgtggaatttaagtattctttgttgtggccaaaaaataaaatttgatatattgacctatttgtttctcttgattatcataaaataggaatttctctgacaacttaaaagtctgtagttttaaaatctgtgatttacatagctgctgtttgggattgccttaaattattaggtgtttccagcagaaggttgaaataggatcttctccttgttcaattaaataaaccaacctgcgaaatctcctaatggcagtgagaggctttttttttttttttttttttggtgaatagtaaagatgagagataatggtcaaagataaaaagaaaaccaagaataattatccctgtgtgccaggagtcacataaactgtacctaagacactgggctttttaaaagaatttctggtataatcttcatttcagtggtattttatttttttcccactgttgtccatcatactgtgacagagtacttaaactatcttaacttgggcagtttggaagtgcttgtgataggaaatatttgtgttgtggggataaagattgggtaggtacctaattaatgtaggagacctgtactgttgtaacagggagaacatcagtcaatcccaaacctccttatggtttgttgaggctgactgttccaacttgaaaatcagtaagttgcatgtttattagtgatcttggcttcatttactattcatttctcctttgaagtgagtcataggtttcaagtctcctgcctagtttcacttgttctgtaattgggatatagagggatagggatgtgaggtatcactattgttaggttgtgaatggagagcatagtctacttttaataccattttatttatttatttattggagacagaatttcactcttgttgcccaggctggagtgcaatggtgcaatcttgtctcactgcaacctccgcctcctgggttcaagcaattctcctgcctcagcttcccaagtagctgggcttgcaggcatgcgccactactcctggataattttgtatttttagtagagatggggtttcaccatgttggtcaggctggtctcgaactcctgacctcaggtgatccacccacctcagtctcccaaagtgctgggattacaattgtgggccaccgcgcttggcttaataccattttaatacctgcttttatagcattttggagaatgaggaaagatgatgtctgtttttgatccttaaggatatgagtattctctgaatatattctggagacagtgccagaggaagattttggtcttacttaataattttgaaagcttgagcatatctattgtaagagttaaagaaagaggaaagaaacacgaaatgtggctggcagttaaagacaagttcactttagacaaaacctgagaggtgctcctggctgattttgatcaggagcgctttctcttacagactaagagtatatattggttttagggtgagggggcttatcacaagattggaatgtttatgtgtgtggagaagtttatggtggggttagaatctctctgggaggaggggaggttatcttggggcagacatctttccggccaggaggggtgttatctcggggctagcatctttccaactggagcggggtttatttcggggctagcatgtctctggtcagggaggagtttggaatgtttctggttggagatgttatttgtggtttatggtcatgctgaccttagccattaggctgatgccctttgaatttaggcagttttttattaaggtgaattttagaatgaggggcttgtccaagatggcgatgctcctactctgtcaatccagaccctataatttgaggagggacggcgtgttcttctggctacttcctgctgactaggggatggagagttttctggtctcaggttgactgtaggagcaatgacatctgtagatgtttttgggtagttgtctgtgaaatggccatgatcctgtcagataaaaatctttgaaaaaggttaattgggcagggtaagaacattagtcccaggcatattattagaagggggctcaggaatgggatgacacatgctatgattttgtttccaaaccaagaatctgtttggttgtttagatatttccttagctttttatttccttttttttttttttggagtcagactcttgctccgtcacccagactggagtacagtggcgcaatctcagctcaatgcaacctccaactcccaggttcaagcagttctcctgtctcagcccccgagtagcttgggactacaggcgcctgcctgtacgcccggctaatttttgtattttttaagtagagatggggtttcaccttgttggtcagggtggtcttgaactcctggcttcaggtgatacatgtgcctcagcctcccaaaatgctgggattacaggcgtgagctacttcacctagcaagatttcttatttctttacattgatatttatgacttttgggggctgtcaggggttgcttccttagctttccaggctttgacttgagtgtgatgtatttaggagttgattcctgtaacaggtaccattttaattaccctgggttccgtggattcactagacatgggggtgaaggattctgggcaccctcagttattagttgtcagcaccagcagtgaagagatttccttctgtgatggtcggggagcttagaggcagcgtctgctgaaacatctagttttcagtttatagggctttaagaaagcccgacttattttggaaacttgtagccagaaaaattagaatttaatttaagcagtagaaaataataaaaactgaaaaatgttaggcaacactagaatttaacaacaggtgtgctatggttttttaaatataattttctttttccagtttcccatttttattaaaagacaaatcatggtaggaatggtttgctttattatacttggcttaattatttgcatacagtgcagcaagaataattatttgttacataggccttttaaattggctttgatggaactttgttctgtagaaggaatctgagagaaaaccgttttagccaagcccagccctggatttgtactatcaaatatctatgagttggtgaatttctttcctcttgaggtcccaagataacttggtattcctggtctgctagaaagtgacattctttacttaccatagaccagaaaccctgtacagggactgtgtacacaaaatatgaggccagttttccaagggcatttttgcctttgtaagtatggttccttaaaggaaagcatattattccagttaaagcctttgtaaaaataaccagtttttccaattctgtcctgttacaaaagaaaacagatttttagtgcacttatgcaagtactgtaacttaagaatactcacagatagtttcaaaattatggagaaaatcaggtagagagaaacaagtatgttccaaattttgttcatggtagtatagtaaattgttaaaagctgttaatagctcaaaagaaaaatttctttgactttgaaaagcaaaacaaaggattagcaatatgttaaaacattaaaaagattggtctcctgttagtttagttcatggaattaattcctgtcatgctcaatattaacattttatctcttcaaaagtcctgaacgtttttcctctattctgatgttacagtctccagtgttatcagaaacctgcatttaagagcacctgttagagctttatagctgattataaaaccaccttttaaagaggaccaaaacaaggcaacaattgtttatggatgacaaaaagttttagggtagccataaagacacaattgacaaggatgacacacaataattttaacataacgattgtaattattactgaaaatgtacactaatatatatcagaattataggagtcttccataactttggaacacatatgagtaacatacaaatatagaccaaagaaagccaaataccgttttatatttgacaatgcttcttgtatgattttataccagataagctaaatttcacctttctattagtgtgctattaatgttaaactcaattttaataagaccttgtaggcatatttatccaattttaatatctgaccataaggtaagatttttatagactttttttaatgctttataagttttgttaaagaacaggttagtgctttaagaaaaacccattgtgcttttgttttaatgcccaatttacagaaaaactggatgatacccctttaactttaccaatatgtttacacacagaatttcctttataattaacgtttcaaaacttgcttaaaccttcaaaacaattttttaactttttaatgtaggtaaaaatccacattcttatgcctccttataatccttttacgaaaagtatattttactttccttacacaccttgcatataaactgttttttcaatagctttaaatacatgttacaccattaacttttattattatactttaagttctagggtacatgtgcacaacgtacaggtttgatacataggtatacatgtgccatgttggtttgctgcacccatcaactcatcatttacattaggtatttctcctaatgctatccctccccgcagtccctcatccccttacagtccccagtgtgtgatgttccctgccctgtgtccaagtgatctcattgttcaattcccacctgtgagtgagaacatgcggtctttggttttaggtccttgtgatagtttgctgagaaggatggtttctagcttcatctgtgtccctgcaaaggacaggaactcatccttttttatggctgcatagtattccatgctgtatatgtgccacattttcttaatccagtctatcattgatggacatttgcgttggttccaagtcttgtgaatagtgccacaataaacaaacgtgtgcatgtgtctttatagtagcatgatttataatcctttgggtatatacccagtaatgggattgctgggtcaaatggtaattctagttctagatccttgaggaatccccatactgtcttccacaatggttaaaccaatttacactgccaccaacagtgtataagcattccagtttctccacatcctctccagcatctgttgtttcctgactttttaacgaccgccattctaactggcgtgagatggtatctcattgtggttttgatttgtgtttctctgatgaccagtgatgatgagcattttttcgtgtgtctgttggctgcatagatgtcttcttttgacaagtttctgttcatatctgttgcccactttatgatgggggttgtttttttttttgtaaatttgtttgagttatttgtagattctggatattagccctttgtcagatggatagattgcaaaaattttctcccattctgtaggttgcctgttcattctgatggtagtttctttcaccgtgcagaagttcttcagtttaattgatcccatttgtctattttggcttttgttgccattgcttttggtattttagtcatgaagtccttgcccataactatgtcctgaatgatattgcctaggttttcttctagggtttttatggttttaggtctaatatttaagtcttttatccatcatgaattaatttttctataaggtgtaaggaaggggtccagtttcagttttctgcatatggctagctagttttcccagcaccatttattaaatagggaatcctttccccatttcttgtttttctcaggtttgtcaaagatcagatggttgtagatgtgtggtattatttctgagggctctcttctgttccattggtctatatatctgttttggtaccagtactatgctgttttggtgactgtagccttgtagtatagtttgaagtcaggtagcatgatgcctctagctttgttctttttgcttaggattgtattggcaattcaggctcttttttgattcaatatgaagtttaaagtagttttttccaattctgtgaagaaagtcattggtagcttcatggggatgacattgaatctataaattactttgggcagtatggccgttttcaccatattgatttttcctatccatgagcatggaatattcttccatttgtttatgtcctcttttatttcgttgagcagtggtttgtagttattcttgaagaggtccttcacattctttgtaagttgtattcctaggtatttaattctctttgtagcaattgtgaatgggagttcactcatgatttggctctctgttggtctgttattggtgtctaggaatgcttgtgatttttgcacgttgattttgtatcctgagactttgctgaagttggttatcagcttgagattttgggctgagacggtggagttttccaaatatacaatcatgtcatctgcaaacagggacaatttgacttccttgtttcctaattgaatgccctttatttctttctcttgcctgattgccctgaccagaacttccaacactatgttgaataggactggtgagagagggcatccttgtcttgtgttggttttcaaagggaatgcttccagtttttgcccattcagtatgatattgattgtgagtttgtcataaatagctcttattttgagatacgttccatcaatacctcgtttattgagaattttagcatgaggggctgttgaattttgtcgaaggccttttctgcatctattgagataatcatgtggtttttgtctttggttctgtttatgtgatggattacgtttgttgatttgcatatgttgaaccagccttgcattccagggatgaagcctgctggatcgtggtggataagctttttgatgtgctgctggattcaatttgccaatattttattgaggatttttgcatcaatgttcatcagggatattggtctaaaattctcctttttttgttgtgtctctgccaggttttggtatcaggatgatgttggcctcataaaatgagtcagggtggatcccctctttttctattgattgaaatagtttcagaaggaatggtgccagctcctctttgtacctctggtcctggactttttttggttggtagactattaatcattgcctcaatttcagagcctgttattggtctattcagagattcaacttcttcctggtttattcttgggagggtgtatgtgtccaggaatttatctgtttcttcttgattttctagtttatttgcatagaggtgtttatagtattctctgatggtagtttgtatttctgtgggatcggtggtgatatcccctttatcattttttattgcgtatatttgattcttctctcttttcttctttattaatcttgctaccggtctatcaattttgttgatcttttcaaaaaaccagctcctggattcattgatttttttttttttttaaggtttttctgtgtctctatctccttcagttctgctctgatcttagttatttcttgccttttgctagcttttgaatttgtttgcttttgcttgtctagttcttttaattgtgatgttagggtgtcaattttagatctttgctgctttatcttgtggccatttagtgctataaatttccctctacacactgctttaaatgtgttccagagattctggtatgttgtgtctttgttctcattggtttcagagaatatctttatttctgccttcattttattatgtacccagtagtcattcaggagcaagttgttcagtttccatgcagttgtgcagttttgagtgagtttcttaatcctgagttctaattttattgcactgtggtctatgagacagtttgttgtgctttctgtccttttacatttgctgaggagtgctttacttccaattatgtggtcagttgtagaataagtgcagtgtggtgctgagaagaatgtatattctgttgattttgggtggagagttctgtagatgtctattaggtctgcttgttgcagagctgagttcaggtcctggatatgcttgttaaccttttgtagttgatctttctaatgttgacagtggggtgttaaagtctcccattattattgtgtaggagtctaagtctctttgtaggtctccaaggacttgctttatgaatctgggtgctcctgtattgggtgcatatatctttaggatagttagctcttcttgttgaattgactcctttaccatcatgtaatggctttctttgtctctttgatctttgttggtttaaagtctgttttatcagagactaggattgcaacccctgcttttttttttttctctccatttgcttggtaaatcttcctccatctctttattttgagtctgtgtgcgtctttgcatatgagatgggtctcctgaatacagcacactgatgggtcttgactctttatccaatttgccaatctgtgtcttttaattggggcatttagcctgtttacatttaaggttaatattgctatatatgaatttgttcctgtcattatgatgttcgctggttattttgcccattaattgatgcagtttcttcatagcatcagtggtctttacaatttggcatgtttttgcagtagctggtaccagttgttcctttccatgtttagttcctccttcaggagctcttgtaaggcaggcctggtggtgacaaagtctctcagcatttgcttgtctgtaaaggattttatttctccttcacttatgaagcttagtttggctggatatgagattctgggttgaaaattcttctttaagaattttgaatattggcctccactttcttctggcttgtagggtttctgccgagagatccactgttagtctgatggccttccgattgtgattaactcgacctttctctatggctgcccttaacagtttttccttcatttcaaccttggtgaatctgtcaattatgtgtcttggggttgctcttctcttggagtatctttgtggtgttctctctatttcctgaatttggatgttggcctgccttcctaggttagggaagttctcctggataatatcctgcagagtgttttccaacttggttcccttctccccatcactttctacaccaatcaaacgtagatttggtcttttcacatagtcccatatttcttggaggctttattcatttcttttcagtcttttttctctaaccttctcgctttatttcattaatatgatcttcagtgactgataccctttcttccacttgatcgaatcagctattgaagcttgtgcatatgtcatgacgttcttgtgccatgattttcagctccatcagtttatttaatgtcttctctacactgtttattctagttagccattagtctaatcttttttcaaggttattagcttccttgcgatgggtttgaacattctcctttaactcggagaagtctgttattaccgaccttatgaagcctacttctgtcaactcgtcaaagtcattctccttccagctttttttctgttgctggcgaggagctgccatcctttggaggtgaagaggtgctctgattttagaattttcagcttttctgctctggttctcctcatctttgtggttttatctaccttcgttctttgatgttggtgacctacagatggggttttggtgtagatgtcctttttgttgatgttgatgctattcctttctgtttgtttgttttccttctaacagatccctcagctgcaggtctgttggagtttgctggagttccactccagaccctggttgcctgtgtatcaccagcagaggctgcagaacaacaaatactgcagaacagcaaatattgctgcctgatcttcctctggaagcttcgtcacagcggggcagctgcctatatgaggtgtctgttggcccctactgggaggtatctcccagttaggctatacgggggtcagggacccacttgtggaggcagtctgtctgttctcagagctcaaatgccgtgctgggaggaaccactgctctcttcagagctgtcagatagggacgtttatgtctgcagaagttgtctgctgccttttattcagctatgccttgcccacagaggtggagtctagaggctgtaggtgttgttgagctgtggtgggctctgcccagttcgagcttcccggccactttttttacctactcaagcctcagcaatggcagacacccttccccagccaggctgccgcctgacagatcgatctcagactactgcgctagcagtgagcaaggctccgtgggcgtgggacccgccgagccaggcacgggagagaatcatcttgtcagcgggtgctaagaccttgggaaaagtgcagtatttgggtgggtagtttcccatttttccaggtagtctgtcatggcttcccttggctaggaaagggaaacccccgactccttgcgctttgtgggtgatgcaacgccccaccctgcttcagcttgccctccatgggctgcacccactgtccaaccattcccaatgagatgaaccaggtacctcagttggaaatacagaaattagccgtcttctgcgtcgatcatgctgggagctgcagacaggagctgttcctattcggccatcttggctacgctgttaacttttagtaaactttacttttgttgaaaaccttgtaagtttgggattttaattatgtgctaggtgtagagcccaggacctagaaagaagtgcagttaaatgttctagcatttaactccacgtgtcgtaggttttacctagctgcaaagcaggccagttgtccagctaagagttacagtgacattttataaagcattcaggaggcctaattacttttaaattatacaacatttcttgtataaattcccttttataacatttttcatgactttcacagacaatccttgacatgcctcaactttctgacttgtaaacatctctttctttaaacaaccagttaacttaggacaagaatttaccatataagattctttttccataacttctcctttctttaatgtcacagatgataaccattctttcccaaagcaaacttccttcatgtttgtggactagactgcctaagccacaagattagaagctaagatattttactaaatagtttaagatacagctatcttcattaaaccaatattaatatttcatttattaaaaaattacacaaggctgggtgcggtgtctcacgcctgtaatgccagcactttgggaggccaagacgggtgggttacctgaggttgggagtttgagactagcctgaccaacttggagaaaccccatctctactaaaaatacaaaaaattccccgggcgtggtggcacatgcctgtaatcccagctacttgggaggcagaggcaggagaatggcttgaacccatgaggcagaggttgtggtgagctgagattgtgctattgtacttcagcctgggcaacaagagcgaaactctgtcttaaaaaaaaaaatgacacaagcaaagatgattttgtttgggctgagttagttttgcagcctctatgcaaaatgttgacaccttacagtatttggccgagaaaagtatgaatttgcctgattaacaaatgcaaacaaaaaggtatgctggcaacttttaagatacttctaactttagtgtaccagtaagatttaaagattaaggtcacgtgaactgaaaggtcccacagcttttacttttcccttaaaaatatttgatttaagtgcttagttttcttaggccaattaattagagctcttttaatagacattgcacagacaacacatatatagccacacagacaaccagaagaagattcagtagctataacgttttttttttctctctgctaatttcccaattggattattgaccttcaggtgaggcccttgaagaacaggactaggaaaacagtttccagggtctaataaacaggtatagctggaagacaaatacaaagattttgagaggtacttatttacctctaattccacggtttccataaggaaaacagatttttccccaaaatgggatttgtggtgccttttctcttttccaaaggaatcccagggcaccagaagtcattttagggttttttacatatgcaccaagagttgcaagacacagtgaagaaaagtaattgagttaactgggggaaaaccttttccaggaaaataagattgatgaagagaaaactataaagaccttttgaatatactcatagttttgatctgtgacaagtcagacatggagaaagagacatgaacatgagcagtgcctttaactccagccacttcccagagagggagaatggcagaggtggtttttgaatgggtaacaggtggaggaggaggaggagtggggtttggggctgaaggcttggaggcaggtagggccaccagggtggagggtttggacaggctaggagcagatgcagggggataagaatacagagagggttcatctgcagggtcaaaaggagtttcggaggaaggagagacccggagagggtttttaataagaagaaagattttataagaggtacaagcttgacacaggtagggttgggatttaaggtagaagtagaagaaggcctgaatatagagaacctcttgccatttgccattcctggtcataaagttgtgaagttcctgagaatttgcaagttaaagatgccattttcggaccatgggctgccattatctaatgtgttttggggccaggctgtgttacagtaaaagactaaacacttaagccaactttggcgaggtcatgaaggagacagcacagtggagagaccgtaggaatgtggaattgtttggcacccatgtggactggtgagaagaagccgagggtgtctgtttttgttctaggcatccccagacaaaagacagaagtccggaatcgtctttctgaagaggacagtcatcaagctgagaagaaactgggcatccccaagatttcctctagcttagtcctgctggtcctctgaggaccgggatggctgacctgacttttcctgggtactgcaagaaagccaggggacggcagatcttaccagttggctggattagtgtccaatgttggatgttccggttggatttggcaaagggcctcctggactgcagccgcacgagggagagagagagaggaagaaaaaaaaagggaggatgagggaaaagtgaagtgagagaaaagatggggcatgtggccagagaccctcaggatccaggaattaactcaagatgagctgctgttgcccactgcttcctgggttgcaagagagcctctgcccccagcactcatcccgggtttgggcaccaaatgtaagagttaaagaaaggaaagaaacacaaaacgcggctggcagttaaagacaggtttattttagacaaaacctgagaggcactcctggccgatttcgttaagaagtgtttccttttacagactaagaatatatattggttttagggcgagggggcttatcacaagcttggaatatttatgtgtgtggagaattttatggcggggttggaatctctttgggaggaggggaggttatcttggggcagacatctttccggcccagagaggggtttattttgaggctagtatgtctctgatctgggaggagtttggaatgtttcaggttggtgatgttgtttgtggtttatggtcatgctgaccttagccattagggggatgccctttggatttaggcagtttcttattaaggtgaattttagaatgaggggcttgttcaagatggtgatgttcctgctctgtcatctgtgaaatttatgaccctcaatttcactgcctgtaaaatggggacggtactaatacagcaatgcccagcccagtgtttggtacataaaggaactcagtaaacattattgtgctgccttttttctcttcttcagtgttttgtgaatcaaatggaacaaagttttatgacaacattttctaagttttaaaactccttataactaaactctttgtttttattcttaaggttgtaagttactacacactgctatacgtcaaattttttccccctattggttttatactctcttaaatttggtaattctgttttcaggcacctaattattagtattttatatagccatttaagtcacttgtaaaaaatctatttgctgataaaaccgatagaaacttgaaagaaatagtaatctttgtgctatgtgtagcactgttctttaagtcatggaaatttgtagttttcaagtggaggctataattaggtggaagaaaagggaaggacagctacaagttggataggaaaagtgttacattgccagtacagctctaagaaagtaacagcatggcaatgggagtcctcaaaccaaagttaccaagtcagaggagttcagtttttcctgggaaaaggtctccattaagtatgcctgctgttctcagtcatataggctgggaatctttgcctgtccccagcaagagaatggatttgataggtcagcagttgggaccattgataatgatgttccttgcagtgggaaacctgagaggcaggttttcatacaaagtttcattaaaactttcatacagagtttcttaaggatacagactgttttatgctgcttttatagtttctgaagagcctaggtaggttaaatacatttttaaaattttaatggaattttcagggaattaacaaagattgatgtggaagaactgtattgagtttgctgttaaaattatatatagttttattgcctccttgattgttccactgagaaaaaatggaggcacgatatttgatatttgtggacttgaatttcttctttctggctttcagtgtcttgagtggtttgagagaaggagaaataaaacttgatataaggcataatgtgctttttaagttttctcactttttttgagtttactgttattttgtgtttatactgtttcaaattcccatatatatctgaggtaaggccaaaagcagtattgaatatcaggagttaaagttactcttttgactagtttcactaaaacctttctattttttttttttttttttttgtggggagtggtcagctgcttgatatatttatttataacaaccttattgagatataattaatgtgatgtatatttacccttttaaaggatataactcattggttttagtatagtcacagagttaggcaactatcactactatctaattccagaatattttcatctcaaaatgaaactgtgtacccattagcagtcactccctatcctttccttcccccaggccctggaaactactgatctactacctgtctatggatttgcccatcctggaatcacacaatgtacgatcttttgtgtctggcttctttcacttagaatagtatttttgaagttgattcctgttgtagcatgtctcagtacttcattccttttatggctgaataatattccattgtatggacatgccacatatggtttatctgttcatcagctgatgaacatttagattgtttatactttttggctgttatgaatgatgctactatgaatatttgtgtcaagtttttgtggggaaataggttttcatttctctttagtgtgttcctaggaatggaatcacaggcccataaagtgattaaatgattaacagtttgaagaaatattaacctattttctaaagcagctgtacctattttctaaagcagcaatcccccaacaatgtatgagcattgcaatttctctgcaactttgatagcacttgttattatctagttttttattatacccatcctcgtgggtgtgaagtggtatctcattgacatattaatttgcattttctgctgttctatatcttttcatgtgcttattggtggtttttatgtcttcttggggagaaatgtctatttgaacagttgtagttttacagaaaagtgagtggaaagtacagagaattgccatatatacactcattccaaccccatctctagagtttccaatattactggtgccttggtgtagtacatttgtgacaatcaatataccattatttatacattattattaactaaagtttagagtttgccttatggttcactctttgtgttgtacagtctgtgggttttgacaattgtatagggacatgtatctactattagagtatcatacaaaatactgcactaaaaatttcctgaataacacctactcatttttcccttcttcaagacacttgataactgttgatctttttactatttccatagttttgccttttcttggaatcatacagtatatagccttttcagattagctttttttctcagcaatatgcatttaaggtgcctgcataactttgtgatatgatagctcatatctttttttttgagttggagctttgctcttgtgccaaggctggagtgcagtggcacaatcttagctcactgcaacttccgcctcccaggttcaagcgattctcctgccccagcctcccaagtatttgagattacaggcgtgtaccaccacacccagctaatttttgtatttttagtagagactgggtttcaccatgttggccaggctggtctcgaactcctgacctcaggtgatccacctgcctcggccttccaaagttctgggattacaggcttcagccaccgtgcccagccgatagctcatttctttctagtgctgaataatattttatttatggatatatcacaatttgttcatccatttacctgttgcgggacatcttggtttgggtagctgaagtttagacaattatgaataaaggtgctgtaaacattcatgtgcaggtttttatgtggtcatattttcagtccatttgagtaaataccaggtagtacaattgctgtggtaagagtaagtttagttttgtaaacaagtgctaacctgtcttctaaagtggctgtgtaaaataatttcgtattcccaccagcaatgagtgagtgttcttgttgctccacatcctcaccgtcctttggtgatgtcagtgttttggattttagccattctaataggtgtgtagtagtagtatgccagtgtattaatttgcaattccctgatgacatatgatgttgaacatcttcttatatgctttattttcccatctgtttacctcttttgatgaggtatctgttcaggtcttgtcttagtccattgaagtagctaaaataccataaacatgggtgggttataagtaacagaaatttatttcttatggttatggagactagggaagtgtaagatcactggcagattcagtgtctggtgagggcttgttttctggttcatagatagtgccttcttgctgtgtccttccgtgggggcatcttttataagggtattaatctcagagtcctggggcttctggggcatcttttataagggtattaatctcagagtcctcatagcatgatcacctcccaacagccctacctcctaataccatcacattgatgcttaggtttcagtgtatgagtttgataggctagtctactaacattcagaccatagcaagccttttgtccaattttaattgagttgttggttttcttattgttgagttttaagaattctttgtatgttttgggtaacagtcatttatcagatacgtattttgcaaagacttttcctagagtgtgtgacttttcattcatgtcttcctcagagcagacatttctaattttaacgaagttcaacttaccaaattttttctttcatggatgtgttttttatgttgtattttaaaagtcaccaccaaacccaaggacacctagatttttttcctgttatcttctaggagtttaatagcttttcattttacagttaagtctatgatccatttcaagttaatttttgtgaaaggtataaggtctatgcttagattcatttctttaattgtgtctgtccagtttttccagcactacagttatttccccttactttcgggggtatgttccaagacccccagtggatgcctaaaaccatgaatagtaccgaatcctatatgtaccatttttttcttatacatgtgttctgtgataaaatttaatttacaaattaggcacagtaagtgattaaaacaaaataataaaatagaacaattatataattacagtatactgtaaaaaagttatatgaatgtggattatctccctctctctcaaaatatttattgtgctgtaaccacccttcttcttgtgatgatgtgagatgataaaatgcctacatgatgagatagtgaggtgagtgacataggccttgtgacatagccttaggctactactgaccttctaaccatatgccagtaggagaataatctgctgtgaatgatcctagatcagtgagccataataatgtccatggttagacgtcaagagcagacaatgccgatgactaacgggcaggtagtatatacagtgtggatgtgctggacaaatagaggatttatattcctagtgggatagagcaggacagcgtgagatttcatcacactactcagaacagtgtgcaatttaaaatttatgaatagtttattactggaattttacatttaatattttggaactgtggttgactgtaggtaactgaaactgtggaaagcgaaagtgcgggtaaggagagactaatgtagtagtagtagtagtaataatgcttactacttagggttaatataatgattaaatgtggtaatgaatgtgaaatgcttaatccaatgactggcacaaagtaaggtctcacttagtggcagcttttacgattagcagtagttcctcaatattggaaagtgtagaattctgaggagccaggcatccactgatctttttctaaattataccacagacaagcatcagtcaaattggaagcctaggaaaactattatttagacaaacaattgtaacaaacgtggctcttttaacttctatagaactgttttttgttattgttttttaataacaaaatattatggtacaaaacaattgaaagcttctagtttttcataggtcctacaattgcaaaaaggtataattgcttaaaaaatccatatcacagaacagtaaaaagaaaaaaataggtgggcgcggtggctcacacctgtaattccagcgctttgggaggccgaggcaggtggatcacgaggtcaggagatcgagaacatcccggctaacttggtgaaaccccatctctactaaaaatacaaaaaattagctgggcttcgtgacaggcacctgtagtcccagctactcgggaggctgaggcaggagggtggcgtgaacctgggaggcgaagcttgcagtgagccgagatcgcaccactgtaccccaggctggactacagagcgagactccgtctcaaaaaaacaaacaaacaaacaaacaaaatagataaaaattatcttttttcccctccccttaattctgtttttcattatagaatttgtaggtccttctaaatctttttctgtggataggaatcataagaaatgaagcccatcttgatttcttatgatgcctatcatataccttatttgaatctcatttattatgatgcctatcttataccttatttgaatctcattgtgttgtaccttgaaatttcttacataaagtttctgttagaggtaaaatgttattagctcttacctgtataacagctatctatatagacacctaaattggttaattattgctaagagaactaaacatttagtaaagttgttttataaaagtagtcttagactactaagtgacttgaccataagccagaaggagggtcatctcctttatttcttacagttctggaggctaggaagaaattagggaacttagttaagaaaataagtttaatttttaaagaaattagggaactttaattgccttataaaaattttattgcaggccgggcgcggtggctcacgcctgtaatcccagcactttgggaggccgaggcgggcggatcacgaggtcaggagatcgagaccatcccggctaaaacggtgaaaccctgtctctactaaaaatacaaaaaattagccgggcgtagtggcgggcgcctgtagtcccagctacttgggaggctgaggcaggagaatggcgtgaacccgggaggcggagcttgcagtgagccgagatcccgccactgcactccagcctgggcgacagagcgagactccgtctcaaaaaaaaaaaaaaaaaaaaaaaaaaaattattgcaaatagtttaagtatcaatatgttttatatcagactttttaggaagagatgtatacccaaatatataaggccagttactaaaactatggaagctataatgaaattctgttagcaagctgtggggcttttactaattctgccctaaaactcttccagtcaaaagcaatgatcaaattattactagagcataagtaaatgtttatggtataaatgaaactgtacctgtaggagttttaatacatttaaaatttaaaaattctacaaaatggttggtttcttttaaaaattctagttttgtgatgttttaatccagaaattgaatcttgactgaagttggtcttcccatacttgaaatttatgttttaaaatttggatggggatggggagaaactataagtaaaacctacagcattctgaggtccaaaacttcctagattgcttcaacttcaatccatttggggaattttggagacatttgtcatttatataagaaagttaatgattaaactttgagaagtcagtatatcatggaaacttttaccttaatgatattattctgaaaagaatataatcatacagtggaatctatgcagttattttaaaaatatgcttcttaatgtgggagatattctaattgtttaagaaaagtctacaaaacagtgaagtgatattttcatttagacaacaaaaaagaatatagcctatcagagtatttacagaaatagttttcatgatgctccagaacagtaagtgatgattgtttttgttttttattttttgttttttttgtttgtttgtttgtttttttgaaacggagtctcacactgtcgcccgggctggagtgcagtggcgcgatctcagctcactgcaacctctacctcccagattcaagcgattctcctgcctcagcctcctgagtagctgggattacaggcatctgccaccatgcccggctaattttttttttttttttttttttttaattttagtagagacggggtttcactgtgttggccaggctggtctcaaactcctgaccttgtgatccaccggccttggcctctcaaagtgttgggattacaggcgtgagccaccgcgcccggctgatcgtttttgttttttattctcaccagcagggtatcccaaggcttggtttagtcagtctctttaattttagctattctaataggtgtatagtggtatttcattgtagttttaatttgcatttttaaaatgactaatagtgttgaatatcttttcgcatttatttgccatccgtatattgtctttggtgaagtttctcttcaaatcttttacccattttaaaagattgaattgtttcccccgccccttatctgagaaggatacattccaagactcccagtgaattccagaaactgcagatggcactaaaacctgtatatactgcatttttgtatacatacatacctatagtaaagtttataaatcaacacagtaagagattaacaacaataatatgacagtgtcactactcttgtgctttggcaccattatgataagtaacacaagggttactggaacccctgcagttgatctgctaactgtgagagggctgctatgtgatgaatgggcaggtaacatgttcagtatggacaagctagacaaagggatgattcatgacctggtaggagggactgggatggcatgagatttcaccacgctactcagaacgatggcaatttaaaattcattcattattcctggaattttccatttattatttttggactgtggttaactgaaattgtggaaaatgtatccacggaaaatgaaaccgtggataaatgtttagactactctacttgttgaaaagactatcctttctccattgaaattgctttgttcctttgtgaaagtttagttgaccatatttgtttgctagttctgggccatctgttactgttccagtaatctcttctttcaccagtaccatgctgtctttattcctgtagctttatagaaagccttgaagtcaggtactgtcattcggctgactgttgttcaatactgtgatgactattctgaatcttttgcctttccatataaattttagaatcagtttgttgatatctgcaatgtaacttgctgggattctgattgatactgcattgaatttgcagatcaagttgggaagaactggcatcttaatattgagtgttcttatccatgtacatgatgtaagtttccatttatttagaccttccttgacttttttggtaacagttttatagttttcatcatatagatttttttttttttttgagatggagtcttgctttgtcacccaggctggagtacgttggcgcaatctcggctcactgtaacctccgcctcctgggttcaagcaattctcctggctcagtctcccaagtagctgggattacaggcgtgtgccaccacacctggctaatttttgtatttttagtagaaacggggtttcacggtgttggccaggtttgtcttgaactcctgacctcaggtgatccacccacctccgcctccccaagtgctgggattacaggcatgagccatcactcccggcctcatgatatagatcttgtacatattttgttagatttatacctaagcatttcatttttgcgggtgcttattatgttttaattttaatgccaattgttcctgatatatgagaatacagttgacttttgtacattaattttgtatcctgcaactttactataattgcttattagttctaactgtttatttgtggttgattccttgaggttttcttcacaggcagtaatgttattggcgagcaaagacagttttattttttctgtaccaatctgtatacttgctattcacatcccttatttttttttggcatattgcatcttacacaattttgctttgtagcatctattttctcaccattaaatgtgatgttagctgtagagttttttattgtactttatcaagctgaagaagtaaatttgaattttaccaaatgctttttcagcatctatatatatgatcagtttgtttttcttccttagcttgttgatgtgatggattacattaattgacaaatgttaaaccagtcttgcatacctggaataaatgtcacttgctcgtgatgtataagtatttttatacattgttggatcagtttgctaatgttttgttgcaaatttttgaatctgtgtttgtaagagattggtcagtagttttccttttttataatgtttttgtccagttttgggttaatttctttgtgtgatgtaaagaagtggtccaggctgggtgtggtggctcacacttgtaatcccagcactttggccaaggcaggtggatcacttgatgccaggagtttgagaccaccctgggcaacatagggagcccctatctttatgaaacattaaaaaataaaaaatgggctggacgtggtggctcacgcctgtaatccagcactttgggaggcccaggtgggaggatcacagggtcaagagatggagaccatcctggctaacacggtgaaaccccgtccctactaaaaatacaaaaaattagccgggtgtggtggcacgtgcctgtaatcccagctactcaggaggctgaggcaggagaattgcttgaatccgggaggcagaggttctagtgagtggagattgtgccactgcactccagcctgggtgagagcgagactctttcaagaaagaaaggagagagagagagagagagagagagagagagaaagagaaagagagaaagggagggagggagagagggagagagagagagagaaaagaaagagaaagaaaagaaaaggaggggaggggaggggacgggacgggagaaaggaaaagaaaagaagtggtacagcttcagtcctttacagctgaatatccagttgtccaaagcttcatttgttgaaaaatctattcttttgttatagaattgtgttgacaaccttgtcaaaatctgttggctataaacatttttggactctgaattctctttcattgattgataacatatgtccttatgccagtaccacactgtcttgattactttgtctttgtaaaaagatatgaaatatgagtcctccaacttcttctttacaagattattttgactatctgagtgcacacaaatttccatatgaattttaggattatcttatcaatatcttttttttaaaaaaaagatagctggccaggcgcagtggctcacgccggtaatcccagcaccttgggaggccgaggcggacatatcatgagatcaggagtttgagaccagcctggccaacatagtgaaactccgtctctactaaaaatacagaaattagccaggcatggtggcacacgcctgtagtcccagctactcagaggctgaggcaggagaatcgcttgaacccgggaggtggaggttgcagtgagctgagttcaggccactgcactccagcctgggcaacagagcaagactccgtctaaaaaaaaaaaaggtagctgtaatttcaacaggattgtagtggatctgtagatcaattttgggaatattgccatcttaacattattaagtcttccaatccatgattatagattgtctttatttatatctttctatgagattttagagttttcaatgtataagtcttacattcatttgttaaatttattcctgaatgttctttttgatgttattatatttggattttttttcctcttaagttcttttgcagtgtgttctttgctagtacttcattattttgacatcttttcagtatgtaatgttaaactctgtcctgagtttattttaatattaagataggttacattttataaagatcaccctgagataaaaaatctatctagatagggaatggtggtgaagtaatagctattcctgaactctagggtttaatttctatttttctgtaaattattggaaaaggactttgttgttaacccccagccagtctctctgattccttaatgtggttggcgattataatacctgaaggtacttgtacttgcctgtgcctcttttccatcagtactagggtttcttattttcctaatcctcccaagttactgaatagagagccctttaagaaattggagaagtcattttacctctctaaatttgtttcttcttggtaagatgtaggatgaaatatttaataatcattttaagttttttcatacttaagtgagagtgctcacataaatagcttctttaatctgtaaagaaatattcaaatattagggttcctttctcttcaaattagaattttcctttcttagcttgggataatctatcaagatttatctgaataagctacttcacctcacctttctgttaaaaaacctccactgagtttttgcattacaagatcaagtgtgaactaaggctggccaactcaggttgtatatactgtgtgcaaaggactacattggatgttgtgtaggttacaaggagacatatgaacagtctgtgcaatcaaggagtttatagtctatgtgaagtgttaagtgaattgtctagtttggtgccagctgtgggagttcatgatttatatgatagactatcttcctgtagattccccggaaaattgtgctcacatgaaatcttagagaacctacaagatttataaacatagtaactgtttatgatagataacaaccaaactgaatttctagggctttattgaggagagtgtttatctaggcactgaccatgttactacccaactcttggtaatgcctttaaaatttttttaaattatttttggcagacactctgtgtgaggtacagattttcagtcctttgaacacaataaatgaatgaaaattgatctgaagagaatattaaaacattttcacttgaatcttcacaatctaccagtactagggtttcttatttcctaggtagatggaaagtgttttcgatgaatttggaccagaattggtacaaaaatcaaagaattcaaaatattaaattattttgtctctctttaagattgttataatttgattaagtattcttttttagtgtcatcagaaaaataaagcataggctgggcatggtggctgatgcctgtagtcccagcactttgggaggccaaagcgggaggattgcttgagctcaggagttcaagactagcctgggcaacctagtctcttttatagagaccttgtctctataaaaataaaaaaaaaaaatggctgggcacggtggctaacacctgtagtctcagcacttcgggaggctgaggcaggtggatcatttgaggtcaggagttcaagaccagcctggccaacatggtgaaaccccgtctctactaaaaaaaaaaaaaaaatacaaaaattagtcggacttggtggcaggtgcctgtaagcccagctacttgggaggctgaggcaggagaatcacttaaacccaggaggtggaggttgcagtgagctgaggtcacaccactgcactccagcctgggcaacagagcaagactttctgtctcaaaaaaaaattaaaaaaaaaaaaaaaaaaagaaaacataatattacaaaaacctataattcaattattttgcttttgatttgtttgctgtgttaaaaatgagcttttagatcggccttccctagctttattgagatataattggtatatttaaaaactgcatataattaatgtgtgcaatttaatgcatttggacaaatatgtgtgctcatcttaccatcaccacagccaagataataaacatatatctattgcctccaaaagtttcattatgcccctttcttactgtttttcatttttttgagagggtaggtaagaatatttgacatgacatttaccctcttagcaaattttcaaaagttcaccttgttaattataggccctatgttggaaagcatatctctgtaacttacttatcttgtataactaactttataccgttgaacaacaactctccatatcttcctcccctgtctcctagtaaccaccattctattgtctacttatataggtttgattccttgttatgaaaaataatgcagtatttctccttctgtgactaacttattttgcttagcatagcgtattttccaggttcatctgtgttgtcacaagtggtaagatttccttcttattaaaaaaacttgtaatatttattctattgtatgtatataccacatttttcttatcaattcatctgggttttcccatctttgctattgtgaataatgctgcaatgaatatgggagtgcaggtatctttttgagaccctaattgcaattcttttggatgtttacccagaagtgggattgttggatcatatggtctttttgcatatgcctgttggtcgtatgtatgtcttctttgtctattccagtcctttgcttattttttattcatctcattttttgctgttgagttataggagtttgttatattttctgaaattaactccttgtcagacatttggtttgcaaatattttcttccattccataggctgccttcttactctgttgatggtttcttttgctgtgtagaagctttttagtttgatatagtcccacttgtctatttttggcttttgttgcctgttatccaagaaattattgacaagaacagtgtcaagaaggttttctctgatgatttcttcaaagggttctacgttttcagatcttatgtttaaatctttaatccattttaagttaatttttgtgtatggtgtaagataaggttccaatttcattcttttggatatgggtatccaggttttccaacaccatttattgaaaaaactgtcctttctgcattgtaaattattggcacctttgttgaagatccattgactttatttctggattttctgctctgttccatttgtccatgtgttttttttctttttctttcttttttctttttttctttctttttttttttttttttttgtggggaagaagacagtctctactctgttgcctaggctggagtgccgtggcataatttcagctcactgcaatctctgcctcccaggttcaggcgatctcccacctcagccttccaagtagctgggattcatatgtctgtttttatatgcttgtatcatactgttttgattactgtagttttataaaatattttgaaatgaggagtgtgatgcctccaacattgtcatacttgctcaaaattgctttgaatatttgaggtcttttgtgattctatgtaaattttaagattaaaataaattatgtaaaaaatgtctttaggattttgataggggttgtgctgaatctatagatggctttggataatatggacattttaacaatattaatttaatccatgaacacaggatgtttttccatctatttgtatctgccttaatttctttcattagcgttttataatttttagtgtacaagtctttcacctccttggttaagttaattcctaagtattctgtttgttgctgttgtaaatgtgattgctttcttaaacttttttttggatagtttgttgttggtgtataacaggggcccccaaccctcaggctgcggaccagtgtggtgcatggcctgttaggaaccaggccacacagcaacagatgagcaccaggccagtgagcattactgcctgagctccacctcctgtcagatcagcagcagcattagattcccataggaacatgaaccctattgtgacatccgcatgcgagggatttaggttgcacactccttatgaggtagaacagtttcatcctgaaaccttcccaccagcccctcaccggtccgtggaaaaatagtcttctatggaactggtcccttgtgccaaaaaggttgaggactgctggtatatagaattgcaaccgattttttaaatgttgattttgtgtcctgcaacttgactgaatttattctaacagttttgtgtgtgtgcatggtctaggattttctacctatttcatatgcaaacaaataattttcttttttttttccaatttagatgccttttatttctttttcttgcctaattactctggctaggacttacagtactatgttgaatagatggcaagagtgggcattcttgcctaattgttcataatcttagaggaaaagttttctgtttttcactgttgtgtatgatgtgttagttataggctttttttgtttttttgtttttgtttttttttttttttgagacagagtttcactcttgttgcccaggctggagtgcaatggcacaatcttggctcattgcaacctctgcctcccaggttcaagcgattctcctgcctcagcctcctgagtagctgggattacaggtatgcaccaccacgcttggctaattttgtatttttactagagacagggtttctccatgttggtcaggctggtctcgaactcccgacctcaggtgatccacctgcctcagcctcccaaagtgctgagattacaggggtgggccaccatgcccagcagttatgggcttttcatatacacatgctccatgacctaaaatgaagttacatccagataaactcattgtaagttaaaaatgtcattaagtcaaaaatacatttaatgcacctcatctgtagtacattatagcttagcctagcttaccttaaacgtgctcagaacacctatgttggcctgcaggtggacaaagtcatgtatcgcatagcctattctataataaagtgttgaatatctcatgtaatttattgaatactatatgggtactcatcattaatgtacacagctgaaaacaccattgtaaggttgaaaatttttgaggtgaaccatcaagtcagtgactgattttataacttttattttgttgaggtaagttccttctatatctgatttgttgatggtttttgtaatgaaaggggggtgaattttgtcaagtgctttttccttttttttttttttttttgtttgtgagacagagtcttgctctgtcacccaggctgagtgcagtggcccaatctcagctcactgcaacttctgccttttgggttcaagcgattcttgtgcctcagcctcccgagtaactgggactataggtgtgtgccaccacccctggctaatttttgtatttttagtagagacggagtttcaccatgttggccaggctggtcttgaactcctggccttaagtgatctgcctgccttggcctcccaaagtgctgggattacaggtgtgagccactgcgcccagcctgtttttctcatcacttttaatgcaccaacaatgaggaagagattagtgctgttgttatatatacacaatctttggtgagccagagcttggctgaagaatggtattttcaagcctggccctgtgaggatagggctcttgatcagtttttaacctttggagagattagctggagagggattagagagagtggtacatcacagctctattctcaggaatgggaagtagtcctttacatgtgttttgaggggtgggggctcgtgacttgggaataacttgtttttctaactcctttatttttctgactggtagtgacacttcttacaatgaaatgtattgatatgtattaacgtatctctttttgtcagtaggggtgttattttatatcatcagtgtaaatacatgttcgaccatagattattgagttgatatgggctgggcattgttctagattctagacatacaacaataaacaaaacagacaacaaaactatgtcattttaaagcttatattatagtggggagggatggacaataatgaataaatatgcaaaatagatataatgtattagatgattgttactctggagaagattgaggtaatgaaggggtttaaggattgctgagagtaaatgttgaggttgcaattttaaatagtgtgagaaagtatgtagcatttgaggaaatacctgaagtatgtgaggggggctgatattcagatatttatgcagttgtaaagcaaagtagagaaatcccacatgggtaaaactctttacccactttccctcaatgattacatcttgcaaaattatagtacattatcacaattaggatattggcattgatagaatccactgattttattcaaatttcctcagattctcttgtactactttggagagctgtatgtgtatatatttctttctattttttttttattacatgcataggtttgtgtatagaccatgatagtaaagatacagaacatcacaagtatcctcttactgcccttttataaccacattgacttctctccctgccattactccacccctaacacccagtgtaacccctggcagtaaccactaatctgtttaccatttccaaactttttttctttcaagaaggttataaaaatggaatcatatccagtatgtaaccttttgggctagctttttttttttttttttttttttgtctcagcataggtttctggggatgcaaccatgttgttgcatggatcaataattgtttcttttttattgctgagtagtattccatggtatggatatactacagtttgtttattcacccagtgagtgacatctgggggctattctaaataaagctgctttgaacattcatatgccggttttaatgtgaacgtaaatttctatttctataaaacatatgcccaagagtgcaattgctgggatcctgggtaagttttgaaggttgagccaacaggatttcttgacagattaatgtgaggtcaagccgggcgcagtgtctcatgcctgtaatcctagcactttgggaacaataattgttattgctaataatagcacttagggaggctgaggttggaggatcatttgaggtcacgagttcaagaccagcctggccaacatggtgaaaccccatctctactaaaaatacaaaaaaattagctgggcatggtggtacacgcgtgtaatcccagctactcaggaggctgaggcaggagaatcacttgaacctgggagacagaggttgcagtgagctgagatcatgccactgcactccagcctgggcgacagagtgaggctctgtctttaaaaaaaaaaaaaaaaaaaaaaaaagtcagagagaaagaggaatcaagacttcatggtttttgacctgggcaactagaggagtggaattgccaacagctgacatggggaaagctatgggtagagcatgtttaaaggagatgaaaaattttacttataacatgtcaagttgatgtatattagacacagaaaaattgtcacataagcagttggttaaaagattttggaattcacaggggtggtctggtctagagatatacaattgggagtctgatcagcctttaaagccctgagactggaagaggtgatagaggcagctgaaagaggtgagagactaagttctggctacttcagtgtttaaaaaatagggagattatgaagaactagcaaagaaaactgcaaatttggccaatgaggaaggattaaaaagcaagataatttagtgtcctggaaagtaattggagaaaacatttcaaggagagagggagtcaaccaatcatttttgtgtaaaccttagttgtagcacaaaggcatattctgcacagtaaccagaggttttagttgtgttgtattccaggggatatataggctgatgcccccgtttctagtttctcctgagtaaggagaattttcgagttttagtttctgtattcagaaagcaaatggtctaagagacaagttgaattctacctgttaagctccaacttaacactcttttcatgaaaaaagtgaacactcttttcatgaaaaaagtgaacactcttttcattaaaaatctttttaatcttcctagttggaagtattctttctgtttttagaattctccatcctttttttttcttccagggtcgagggagagacagggtctcaccctgttacccaggctgaagtgcaatgtcacaatcatagcgcactgtagccttgacctccctggttaaagtgatcctcccacctcagtctcccgagtagctaggaacacaggtgtgcatcaccatgcccagctaatttatttttattttttgtagagatgcaatctccctgtgttgtcaggctggtcttgaactcctgggcccaagtgatcctccttccttagcctcccaaagtgctgggattacaggcatgagctgccacacccacccacccacccacccctttttcgataactctagtggcacttaacattttctgttgtatggcatctgtgttagtccattctcacactgctgtaaggatactccttgagacggggtaatttataaaggaaagatgtttaattggttcacagttccacatggctggggaggccttaggaaatttacagtcatggcgaaagggaaagaaagcaggcaccttcttcacaaggtggtgggagagagagtcatcgtgcaggagaaactaacatttataaaaccatcaaatcttgtgagaattcactcactattaggagagcagcatgggggaaaccatctctcccagtcacttccctcccttgacacttgggggggtataggtcctcgcctcagcacgtggggattacagttcgagatgagatttgggtggggacgtggagccaaaccgtatcagtatctttatttgcctacttgtatacttgtcttattttgaattataagctctttcaatactgaagtcctcctttattgtcattgtattttcaagcacatagtaataaatggaattgagttacatttcattgtgatagagcatggaatctgacacacctggtttaaatcttgcctgtgctgtttgctaccaaatttcttaacctctctatgcctacacccgctcttaagtggggatcataatgttgcttacttgataggtttgtggagaggattgaagttgtgaagatacagctcttaacagagtggtcagctcatagtaaattctttgtgttctgtagttgttggtgccatcattgctattgttaataataatatgctgttgtgttattggctctcaaagatacagggttaaaggaatacacacttaagctggcattgacttacatgctagggcttccgaaaactaagtattcaagaacctggtttatatctactttagtagtcatattacctgtcaggatataaaagtccgttattcccttagttcatgcaggcatcctttgtgttgtttctcttccatttccctttctgtgctgggcaagtagtctgtgtaactgattgggaaaagtagcatacatgagtcctttttattgtttctataaaattggggttttgttacagaacatgttaagcctacctaggcagtatgttattttataactataatttaaaattttaacttacacactaattatagttatgtaaaaggaaaatatcataaatttccagaacattagtccctaaatcaatatagaaagtccactatgtatatgtactaagtacaaaattgagattgacggtaaggaactttcctttcttgccttgtggtgcagggattgggaaacagtgaaccagccacctgtgtttgtaaataaaatttataacaaacagccacgttaattcttacacatattgttgtaaacagacagccacattcattcttataaatattgtctgactgcttttcccctacaactacagagttgaataaacctgaagaatttagtgtctggtcctttatagaaaatgtttatttgcccctgttcaagggtattatttttgtggctcatctcttagagcttttctcactctgtctcttgtattgattccttttcttctgtctgcttaaatgatgatattctccagaatcttttcttgaatagctcacctttcctaaggcttacgttactccactgtctaggttctactttctgactaatttctttttagtgtcctttatagactttctgctgctggggagtttgatcactttttttcttattttataggttgagcatcttgaaaccaaaaatccaaaatttgaaatgctctgaaatttaaaactttttgagcaccaacacgatgtttaaagggagtgctcattggagcattttgaattttggattttcagattaggaaggcttaatgggtaaagataatactaaatccaaaaaaagtctgaagtctgaaacacttttggtcccaagcatttcggataatgtgtattcaacctgtataggcaataatatatactctcctatggcttctgaaccacccacacctccttgaggataagaagaacatacggtattgctttctggaccttttcatctgcttcagtgtccctgagtcgtttcaaaatgaatgtgtcccaaattgaactcacttctttctgcttccaaaacagcttccccggccactgaactgtaccgtgttcatagtcatgtgagtgagaagcctgatagctgtcacctccctccttctatttactaattcaatagcagtaggtgatcactactattgtagacccattttcttccatttgtttttctctgtttttactagtgtagatcctagttttatccgccgccacctttgtaacattttttttcatagcaatcttcctaaaacaaatatcttgtgtaaaacacattagtgggctgggtgaggtggctcacacctgtaatcccagcactttgggaggccgaggtaggcggatcaccagaggtcaggagttcgagaccagcctggccaacatggtgaaaacccatctctactaaaaatacaaaattaggcaggcgtggtggcaggcgcctgtaatctcagctattcaggagggtgaggcaggagaatcgcttgaacccaggaggcggaggttgcagtgatttgagatcatgccactgcactccagcttgggtgacagagtgagactctgtctcaaaacaacaacaacaacaacaaaaacaaaagcaaaaaaaaccaatcagtggttctttatgccttgtaatatttagcgctgtatttaagactttccacctgaccccattccagaattttacaaattaataagcaaatttttcttagctcctgtccccaagtatctatagcactttttaaatgagctcaacttaatcacattgtgttatagttgttggtttgctcacccattagactgtaaaacatttaaagattgtaaatttttgtattctcagggcccccagttctgacacatagttggcttcaaaatatgatcattacatgttctatgcatggaacaaaatatccatgtacctcataaatagtaaaatatcatgtatcaattaaaaatatacttgtgcaaatggggttaagtttttttgtgtttttttttttttttagctgttggttcttttagggcaactgaatttactgtgaaatcaaagatttagagatgaattaaatgctttttgagtcttatgatgactaaggatggataatgcaactttggataaccttcattttttttgcagaaggtgtactttgggaaaatattctttaagcaaaacattggaaatgagtcctattttactagattttatgaaagtagaactttctatcatgggggaagatctcccaacagaacaaactttgatgaagaagaaaagatgataaccacatgctgcccatcatacacccacaatattaagcttgctggttgtttcttcacctaaaagtttacttttcctttattaaactttatgtaatggtacaaaaatatagccttctggaactttttcagtctgtgcttttagcttccagaagtttttctttctcttttctctctctttttaaagcatgagatgtcagatattgtaaaaatgaataaaagcctccatgtctactctagaggtggatatatgttaatgagtattggttaaaacaaaagaatcagttttcctttaaatgtgccatttagactttttaaatactgatattatgcttattccatcttgggtagtcattttgttttataaataagttgagaatgattagtaagaatcttgtttacatgtattcttttgtcttttctatttgaaaaaagatgcctttacaggcaagtcagttaccacaatttaaaatttctaactatgaccttaaagtaagacatgcattttaacattgcagcccgatgcacagaaaaataattaacaagtttcatgaaaaaaacccttactgtatgtaaagtgatattctattccattctattctattcttattcctccattctattttatgctatgctgttctgttctgttctgtttcttttctattctattctattctattctattctattctattctattctattctattctattctattctattctattctattctattctccttccacacttccttctcagtgctgattggctggtgcccatagtttggaaaataacaccaagttggaaagtagaagaaattacagaagctgggaaattactttgttaaagacaaagtaacctgctctgagaactctgagagtaatacagaaagatgttcttaaaacacttatagtatgttggttgggcagggtttgtgagtgtgtgtctgtgtctgtgtctgtatagtgactataatatctgatttctataagctacttttgaaaagtatccttttatataacatcaatgaactgtagttgtaaaaataaaaccaagagaacatatagtaaatttcaaaatatttgtaagtgctgcagggagagattggtgatggcctcgttaaaaaggtaaaagttaaataggaacttaaaggatgggcttagaatgtgtgtaggttggagagagagtcagcacattccactgatggtaatgtgatggtaaatgtaatagaattgggaatataattggtttagaattgggaatgaaacaatatattcaggaagagtgagaagtagcatctagcgataatatagaattcacattggtcatgagtggaagactaaactgaaaaggagaggccagattataaagtgatttagactttatcttgtaggcagtgggtctctctctctgtctgtctctgccaacatgtgccgctccatctctcttggttactgtttgtattgtatatcatttttcatccttttacttttaagttgtttgtgtctttgaatctaaagtattaattcctagggatagattatagttgcagctttctttttatatagccttttgattgtatgcttagctctttcacattttatgtagtgtgtgatgtagctggaattacatgtgccattttgctctttgttttctatatctctcatgttatatttgttcttccgttcttcgttactatcttctgtgttgaacaaatattttttagtgtatcgtcttaagtctgctgttgatttttaacattaaattattttcttagtggttgctctaagaattacagtttacattccaatttatcaccattaactttaggttaatactgacctaatttctgtaaaatatagcacttgtgctccattataactgttttctccccctcctttttgctgttattgccttatatattacatttatttacgttataaacccaactgttatcatattctgtcttttaatgaaattaagaggaaataaaaatatatctatagtcttttatattttctcatttatatttaatatatctggtggtcctcacttgtttttgtgaattccagttaacatgtggtgtcattttcttttagctcaaggtacttgttcaagtatttcaacttattctccatctttttttttaagtgtgaggatgtctttattcttcctttcttgcttgaagaatacttttgcagtaaatagaattcttagttgatagttttttttaattttttgttactgccttctagcttccgttttttcctgatgattagtcggctattaattgtattgtttttcccatgtatgtgatgagtgatttctctgttgctcctctcatgtttttttttttggtggcttcaaactgtttaaatgtgaaatgcttagatgttgatccctgtgtttatcatattttgggttcattgataatttttttttcttttctttcttttcttttttttttttttttgagacagagtctctctctgtcagccaggctggagtgcagtggcacgatctcgactcactgcaacctctgcctcccgggctcaagcaattctcctgcctccgcctcccgagtcgctgggattacaggggtgtgccaccacacccggctaatttttgtatttttagtagagatggggtttcaccatgttggccaggctggtcttgaactcctgacctcaggtaatccacccgcctcggcctcccaaagtgctgggattatagacgtgagccaccgtgcctggccggttcattgatcttcatggtttgatagattagtggttttcagcaaatttggggaatgttcagccattatttcttctaacatttttttctcctttctctttttccagttctgcttttacacatatgttgatatgtgtgatgttatcccagaagtatctgaggctctgtttatttttctgcagtattttttccctctttgttctttcttttggacaatctctatttcttcaagttcactgggtttttttttttaatgccatctcaaatattttcttgaggacatagtgaatctcatttttgttataatgtgtttcaactctagttaattctcatgttttaaaagttagcatttctttattgagattctctgtgttgtgcaattgtcatttttctttaatttttaaaatatggtttcccttaattttttgaacttaattataaattataatagctgctttgtattctttatctgctaaatccaacagctttgcccaccaggagttaatttctgttgactgcttttttttaacctgattataggtcaacttttcctgtagtttgcatgtctcacaatgtttttttccaattgaacatattatataatatattgtagcaatgctaggttctgaatttttttgagacagattctggcttgttttctaggctggagtgcactggcatgatctcagcttactgcaggctccacctcctgggttcaagcagttctcctgcttcagcctcccgagtatctgggattacaggcatgcgccaccaagcccggctaattttatatttttagtagagactgggtttcaccatgctggtcaggctggtcttgaactcctgtcctcaggtgatctgcccgcctgaacctcccaaagtggtgggattacaggcgtgagccactgcaccctgccactttcagcattttttgatgatcctatatgtgagttgggaagtatattcaaaattctgacatttttcacattagccttggcttttactttctccggggctctgttgagcctccctccacccccatatgtgcactgcctgtcagacagttatgtgtggggagctaatttaggccctctgtgcctctctcatttccagtatccccttattacatttctgggtgtccttctagtctgtcattttctctaactgggactacattctcattttagcagagctatgggcctttcccctttctgtccttccaaatttgctatttttattgccagtgctactaggcatgggtttttgctctctatcctaaatgaccatagccctctggttttcactgccaacactgccctgggaaaactgcctcactgattgagttgggtggttgtagggggatggtagcatcgcttggcaaagaaggccattttcctctactgttctgtcatatctagcagcttttcaagaataaatgcttctcaatttgttgttgcctttgctcagtttccagagccctgaagtgattgttttcttcagtgtacttcagttttataagtattgtgggggagtagatttgctactgtcatcattctgctgtacctggaaatctctcctcaaactttctaaccccttaggaccctgtgtcccctacacccactttaattcaatctagtcagtttttttcaccattgttctactgaaaccattcttgtaagagtcaccaacatcttgcattttcatagcaattgttattttcctgtgtttatctagccattatccttctgcctatttcttgaatatgccaagcccaccactgagtttttacatttgcagttccctgtaaccatcttccctagatcttcacatggttcttacctttatatcatccaggttgatgttcatatcttaacctccttcataaggttttctccggcttccttatgtaaaatgtagatatttctaaagtaacgcaataggaacagaagagtaaacatagatgaatatttaggtccttatacttgcttcacttaatgcatctttcagtagcttttgacataaatcatcactcagtttttctaaaaattttttaacgtggcttctaagataacattctttcttatttttcttcctgctttattaactactccactctgtcctctatttttcatttcatgaattttttttctgtatgaacttcttccgtaggtgatatcattaggtacccttgctttaaatcttctttatctagatgactcccaaatgcatttttccagccttagcttctaccctgacctcacatgaatgtcgtataaggatttcaaacttaatagataaaaacttaataggttaaaaaaaacttaatagataaaaaacgaaactcttgatctactttttccttcaaatttattctcttaaatttttagaatgctttttttttttttttttttttgagacggagtcttgctctgttgcccagtgctgtggcgtgatcacagctcactgcagcctccacctcctgggttcaaatgatagaatgcttttctgaaaggtaaatctgattgtatcactttcctggtcaaaacctccattagcttccctttacatttagagtgaaattcagtttcttaccatgtttgatgaaggtttatatgatcttgtgcctgcctgcctctctgaacataactcctacctctctgaacttaactcccacctttctctccttactcagaatgatgcagccgtattatctttctggctatttcttgaatatgccaagcccaccactactaggtttttacatttgcagttccctataaccacagtgctgtttcctcagatcttcacatggttcttaccttcatatcattcaggcttgtgttcatatcttacctgtttcatgagattttctctaacttccttatctaaaataagacatttttaaagcaacacaataggaagagtaaatgtagatgaatacttagatccttgttcttgcttcacttatgcattctttttgatcaaaagtattatgcacaatcttatcaacttctgttatctgggaatttaatactctgttaccttggttagtgagtctggaaaaataaataacttattttaacatagttggctatgttaaaaaaatcagtcttaatagctgtatgttatgagaggaatgagtattgatttactagcagttctccctcaaagccagctacctaaatgtgaattaacaaagtatagaggctgggcgctgtggctcacgcctgtaatcccagcactttgggaggctgaggcaggtggattgtctgaggtcaggagttcgagaccagcctggccaacatggtgaaaccctgtctctactaaaaatattaaaataattagctgggcgtggtggcaggcgcctgtaatcccagctactcaggaggctgaggcaggagaatcgcttgaacccaggaggcaaaggttgcaatgagccgagatcacgccattgcactccagcctgggtaacaagagtgaaactctgtctcaaacaaacaaacaaaaaaacaaagtatagaaatacttccagaaatagcttcaatttggaatggaaatggacacaattttgaagttggtagttttctatgttcctctctctgtactagtcaacacttaagagtcttttgttagttatttgttaaagtaattgtactgtactttctgacttattttctgtttactttcggactttctgtttccgttacttttactaacaagtaatggaatgaaagattgatatcttataaaaggattttaaataccattgtacacataagcccaactccgaaaggtcagtttaaaggaacattcacttctgctctcatcttctaagaactagaagccatcctacccttcctattctaggatagctatctttatctggttctttggtcccaacgcatcctcatccccatccttcttggcctcttttctgaccgtaacaccatttcctttccagattctcaggtgtatactttatgttttctagctcttctaaatcattactttaactaaagctttatttttttggctagaaagctggcattttggtattgcttctgtgtgttatgtaatttgtccttcattaagtggatttctgtcagtcaagtatattgttggactataataacctctttgttaatgtacagtctagtcagatttactgctgcgaagtctgtggtattaagaaatcatcatattatttagtgatttctttttttgaagaatgaacataactttgaaacttcccaaagggaaaatagttttgtgtggtctacaaatctatcaggactgtataatttcttttcttttctttctttttttttttttttgagatggagtttcgctctgcattcactttttctaaaacttagcaactgagctcttttcatggagttgatgctcagttttttttttcactgcatcttagaaaacaataaggtcaagctatttgtggtaaagtaacagttcttacagttttgaattcatgggagactgttgtttttgtgaaatatacaaatgaattgctagaaagatgaaatttttaaaaatataaaatatggatcctaattcttattaccatattcttagatatcaatttattctctcattgttataaaagctctaaacactctcaatttctgtatttgtcttattggagagcagtaacagatagttcatggactagtaacaaatattttgcagatcagaaccagtctacagatcacactttttagtagcatatctatagcttgctaattttagtgcttaatgttatttcagaagcatcttgttcaatatgatgaatagctgttatcctttaaaaatatatttttatgtgtttccttttcagaatcgagagctccagatcatgagaaagctagatcactgtaacatagtccgattgcgttatttcttctactccagtggtgagaaggtaggtttgacacaaagtgtgtactgaatattgtgataaatttgttatttttctagaaattaatctccccaccgctcatagacagttttgctaatggaatggaaaaattccgaaacacttgccccagcaatactcagcccaaggtatggtcattgatatcattagttatatcaggaaagcattagtaagataaagggaatgcacttttaagaattttcttctttgttaaagtatgtcttcacttctcaagaaaatctatatactttttttttttttaaagacatctatgttccttatgtgcttacgcagccctctgatagtttacctatttattgcagggaggaaaattaagtcattttgttaagtgaagttgataagaggtaaagaggtagcaagaggactgataggaacagaatgagagttaaacatttggaagcaagttgagccatccttggccagtgaaaaagttggaaaagatgtaatattgcagagcttactttaagtgatccctatgtctgaccacattgaattctgcgaaaccaaaggataaagaagactttgtgctgttaataactccttccaacctctttctcttcagaagacacaataatcaatgaagttggagcaaagaaaataaatttcttctgtttttccttggtgtctttatttttctgcctgtcgctatcctttctttcttttcactggtttggagtgcatacgcagggcaggtaacaaatcacttgattcttttggctaaataaatatgactttggataacttcagttggtattttggacttcagatttcatgcatataatatctaatgttcttagatccataatacttgattcctagctcagtgttcttgttactttatgtaactgttttttagtataacagtttttagccattttctattaagctttttttttacagcaaatattgcctgacaacattttctattaaactttatttagattatttccatagaaagtctttttacattacagtgcctattatataggaagatgtcaatgtattaagcccgaattttgatataaatacctacagtcatataattgttgtgtatatacacatgtattacacaatacgttttaacaactatagttagcaaattggccctttattgacacttgcttttcagttgctttttttttttttcagtttaaatgatacctctggtttactagggattgtgaaccctcataagtattagagctttttaaaacctaccaaatggcctgttattatctttattctgatctgttttggcatgtgtttgctttttcctgtctcttcctaagtaaaattgtacagcctctgttaggttcacaagtacactctttgtaatgaaattttgcatcttcattttgttgttgttgttgttgttactagatacatcatgatactcctgggtaagaattatttgttccataaactgctggattacaatagattcatttgaaaaaaggcctcctcccagagttcttaaacattttctctttgattacttactttaatgtatatagcattccttatatgctaggcactgttttaatgctttataaatattaactcatttaactcttaagaagttgaagagcagaaaagaaagactatcaaaccgtttgaatgcaaggcatctgatggcttacttgtctggttttggtttggtggaaagctcctgtcatagtcagctcttgccctgacttaatcctgcattgggggtgacaactgactgcctcttatctgtatgccccagaggataatttcctctctgctgctgttctcagtttcttacttatcttaaaggttcttacagataaagagcaattagaagtcattaacagagattaacctctattataaaaagtaatagacctaatattttctttatgtcagaactttctcttgagctttgtaaattttccaaaaatttttttaaaaaaagatacctcctaattttgggatagcttcattaaaaacaaaaaggaagaagagaagaaaagttgtgatatattgctgaaaataatggtccttctttgtcaataaaggaaatttttctaagatgtgcagaaatacataggttcaagacttcccgtaatctcccagccaccaaagagagaatttctttttgccccattcatgatctccacttctgaattgttctggcaggactaagatatccttcaggagatcaagtagtaaactatttcttcccataggagaagatggattcttttctagggttgagtgctcaggttagttattttcagttctgactttcttggaataggttactgagagtatccactgctgtttagaaaggaacctaaatgtctgtgaaattcttgcaaatccttgaagatgatttatcttggaatgtggcagtcctatatttggtaggcatttttctagcagaagcattatgtattgcttatgtatattatatatgagaagagttttggaggaggaaataataaattaatcatttgagatgcttatgacacatgcaagtagagattcccagtagatggatagatgtgtgacttcgtagatggtggtggtggctctaggtggagaagtgacattgacaaagtaggataaagagggcgtgtagccatgtggagcttggtggggaggagacatggagtgctgtttgaggccaggacagtgaaaaatcagcggtttggcaatatttattgccttctttttctagaatttgtcaggaggtgaccagtcttcatttgaaagaactgcaaggaaaccagtgcctttaggtgagattcaggttttctctagagcaaaacggtaaaaagaaccctgcatgaagaaattgaggtcattagaaattttcttcttgaggtttcagttttctttttgaggtttcttttgacgtttaggtgagatccaggttttctctagggtaagacagtaaaaagaaaccctccatgaagagattgaggttattagaaattttctttttgaggtttttgagagaatgttatgggagggagatcagtgataagaacatgagcctacaggaagtttgaggaggcaattagggagattagttgaggacattgtgaagatgagaaagaataactcattgtttcaggattagagagattaaaggcttggttaggttctagaatagatgacttaaaatgcatttgggaatttaaaaaaattctctcattctctataacatctctgactttctttccctcttttttttctatcagtctctttctctagcccttttttcgcctttgtctttagtcttcacctttctggattcctcaacctttcactgtaggctccaagtctctatctttctgtctctgggcttttgtcccccctctcttggtctgtgtcaccccctttttggatttcttttccctccatataactctttctcttttctctgtctctttctttcttgtctctctcttctcccccacaccctttttctctctgtctctctccctctcttatttcctttttatgggtctccatcaacctctttctctgggtttctatacctgtctttcaatgggattttacccatcccactctctttctgattgcttctaaatctgtatatgggttctcatctgtcttaaatcttcttcgttgtctctcttagtgtctcttctctctgggcctctattactccctttttggaaaatgttaaggaaaacaactaaattattcactactactgtcctgacctttgacttcagttctgtgtatcttattccatacgtacatgtttatataggtatatgcataattatttatgatctcataaagatttttttctcttgcctcataatatgtataggcattttggttatctaatattccattgttatactatataatattttatctattcccacattgttatttttaattttagaattgtagctaagctaccctgtggccttgtcataatttctgtctgtaagtacttttgcagctctgggagaattaaagtaggatttctgtaataacaggcatgttttacatttcattgaccacagtttgactgaatgatatgtctattttggtaaccttctttttattgtattctgccttttgcattttaaagactttctttagggatagtggataatcagcttttatcctgtaacaggggaaaggggtagccaatgtaactagaagaaagaggaattaagttaggacagagattagagatgtgtactaattagccttagttttctggttggaattattaatgtttgctgtagtaactagagcatcatgtagtcaattcgtatactctatgttacccagtagtaactaactatgatttagtttagagtaagtagtacctcctctcttaccttcccattagagaaaaatgagatatttgagtgttttgaaaccctgggcttatagttttgtgagttgcaagtatcttacagaatagtctttctctttttttaatatttggcagtagaaactttctacatccccaatgaaattttctgaagacctctgatagaacatatgaaaagcagagttgccctagttgaagctaaggtgtgggatcagatgattttgccttttctgagttatagcttaccccaaagaactctaggactctgaagatcatatgataaaaaccatgttatgagctgggtgtggtggctcacgcctgtaatcccagcattttgggaggccgtggcggttgaatcgagaccagcttggccaacgtagtgaaaccccatctctactaaaaatacaaaaaattatctgggtgtggtggtgggtgcctgtaatcccagctactcgagaggctgaggcaggagaatcgcttgaacccaggaggaggaggttgcagtgagccgagattgccccattgtactccagcctgggcaacaacagtgaaactccgtctcaaaaaataaaaaataaaaataaaaactgtgttatgtcttcacaagatccttaaattttatttcaatcaattaatagttttctgtaagaaaaacttctctaagtaacttttcatttaaaagtttttttccttgtggttcatagattactttaataataaagcgaaaaacctctgccttctactttgtgagagactgttcaaataacaaagatgacagttgattttatttctcatgccacctttgttctattgatagtaatgggggcctgtatccagaaggggaggattgtaccactgcatctgggatcagggagcagaatgctgtgcttaattttgctggtctaccactagctctggagaggaaagggtaggggtgacatatatgccaaggattcattctgaaaagtaaagagcactggctttgtagctagaaatatttgagtttgcattccatttctgccacttgatagtagtatgactctgggcaagatatttacttttataagcctcctccccgccatctgcacagtaggggttttgtaaggaacaaatgtaataaggttatcacgtgctcattatagtacctggcatataaattaacacttaataaacattaatttactattttacctattattgtgtttattaatagcaaatatatattgcgctttttatatgtcaaacattgtcctgagctgtttacatattttataactcacttaaacctcatagcaaccaattaaagaatgagttttatagaagcactattttatagaagaaactgatacaacagccgttaagtaagttaccatacaactactaaatggcaatgttgggcgtcagctccaagtagtctgactccagagtctgtatagtatgctatagtgtttagcataggacgtacattcctccagaagcagtgtgctagaaatagaacattaaaaaatatcttagtaaattatcaaacaaggggagattataatattaatagtagtattacgccagtcaaggtggtttacgcctgtaatcccagcacttttgagaggccgaggcgggtgaatctcctggggtcaggaatttgagaccagcctggctaacatggtgaaaccccatttctactaaaaataaaaaaaattagccaggtgtgatggcaagtgcctgtaatcccagctactcaggaggctgaggcaggagaatcgcttgaacccaggaggcagaggttgcagtgagccgagatcgagccattgcactccagcttgggcaacaagagcgaagctccatctcaaaaaaaaaaaaaaaaaattagtagtaatagttgcagtactagaagtagtggtattgataataatagctaaaaggtatgagatactatatgccaggcattaatctaaacacattacttatatttactcatttaatcttcacaacggttctatgaagaggagatggagagaagttaagtgacgtgacctgcccatagagtgatttaaaccagtattttaaatttctagtttgcaggaagtatgtgactcttctaaaataaagattgtgcattttttcgagggagctagcttgggtgttttattaggttttcaaagaaatctctgacccccaaaagataaaacagaaccatcaagccattcacccaagagccaaggagatataattatagcaagctatgtaaatatttataaatatttattagaaatgttttgatgagatttgagcccccacagtctagctctggattccattaaccttccctaataccaccactcttaatttcagtatatgtttttcttttaataaagaacttttatcagaggtttctaaaacttgtatgtatgtatgtatatgtactcatttctaattcagttttaactttttcgagagcaggtatgtgtgcatatggttatattaagggatgaaagaaagaaagaaaaggccaagaacagttccttcttaattttgaagcagtatagtataaagaatcaatttgagtatgaatggtgactctgctgttcatgtgtctggccatgaggactggctatgtgtcctcaagcaaattgcttaatttttctccttatcgctaaaatgagggtaatatatgtatgtataatatatatacttgtgttttatatatatttttatatatatacttgtgttatatacaccatgtgtatacacacacacacacacacacacaaacacacacacacacttttgttactgtgaaaattgtggccatgtaagtaaaatgtttatagtatcatgtattagtttttctttcattacctctaaccattagttcttggtgttccctagggttttattctccatttttctttactttcatacttatcctgggccatattctcaatccttgtgacttcagtgactctctaatgtttatcttcagttgaggtctccctgatgaactctagagcctcaaattttagtaccaaccagaaatctctacctggaagcctgagccgtcaacatttagcatgttagaatttacgactccccttatccttgctatatatcaattattaaaataagaaacctggatgttatgctagacctttttgttgacttatttgaatctgttctttctatttcactgataatgctgccttagttcaggcccacattatttcttatctaaactcttggtgatttctcttcttctagtacatacctttacttcctccccacccctagcctaaacagtattttaaaacagggataaatcatagattattctaaacaattagaagagacaatatgggtcattgtcttaagaatttattgtctgggtttaccaaaagctttatatgatcaattagcattggagatgttggagatgggagttgtgaccatccctaatataacatggcagcaggcaatccttctgattgtatcacttcttcagttacctaaaaggtaaattccagatttcttagcatgacatacaaggtctttgaacatctatatcgtgaccttacttgactcatctctcctttctcacaggctatctatgttctagccttgcccaaagtatgtgcaattgtcagaatatgttgtattatccctgttaatgcaaataccttctggaatgcttctttcctaccctccacccctgctctatttttgttgagttctttttcattgtattgtctctgctcaaaagtagctccatctgatatctcactattttctctccccccagccccccttttagccccaaaagcttctctctccttggaatatcttgcacatacctctttcatgacatttttcttgtattttaattattttttttttaactagatctttttactaggttgtgtaattctcagcagcatggtgagattttattaattttgtttctttaatgcttagcccagtgcctgagacaatgtgaagttggctatgtagatttattgaaagccttctagatagtcgtagaaaactgagagctaaaataggctcagcccagatattaacttttgttttttgaagtatattaagatttattataggtattacaataactatttctatagattgtgttattgtaaaggaattattttcttaattttacttttgggatattcattgctgaatatcaatatataattgtatagaattcaagagcattaattacgtatatgatataatgcagctatcactgttatttttaaaacattttccgttttatcacgaaatggaattggagtttatcagatgcccttttggtgataattgaaatgatcgtgtggggttttttccatcattttattaacatgatatattacattgattttcttatgttgaaccactgttgtattcctgagataaaggattataccccaatcttggtcatggggtataatccttttaatatgctattagatttcatattctagtattttcatgaggatttttgcgtttatatttataagggatattggttggtaatttttcttttttgtgatgtgtttatctggctttggtatagggtaatgcttgccttgtagaatgaggtaagaagtgctccttccttttctattttttttagaagagtcttagaaagattattgttaatttcttctttagtaaactggcagaagttaccactgaaatcatcaggtcctggactttactttgttgggaggtttttttctttattactaattaaatctctacttgtgtgtatgtttgttaagatcgtctgtttcattttgagtcagtttgataatctgtgtatttgtaggaatttgcccatttcatccaggttgtctaatatgttaacatacgattatttgtagtatgctgttttcatcctttttgtctctgtgaggttagtagtaatggccccactttcatttctgattttaattctttttctttttatttgtcagtctatccctacatctaaactcttttaagggtttgtcagttttgttgattgaaaagaaaaaaaacttttagttttgttgattctgttttttttctgttctctgttttattcatctctattcatatatttcttatttccttccttctgttagctttgggttcagtttcttctttgtagttctccggttgtagagttagattaatgatttgagatcttctttcttaatgtaagcatttacagctgtaaatttccttctgagcactgtctttgctgcatcccgtaagtcttggtattatgtcttaactatgtaaaaatttttcttgtttaagagtattatcttagtcagtttagtgctgctataaaggaatacctgaggccaagtaatttgtaaaggaaagaggtttatgtggctcacaattctgctagctagaaagtgaaagtctcaggctgcctccacttgtggtggaaggtgaaggggagccaacatatgcagtggttacgtggccagatagcagagaggtgtcaggctctttttaccaaccagttgtagtgggagggaactcatagaatgagaacacattcattaccaagaggaaggcacaattccattcatgagggatccacctctgtggtccaaataccttccattagaccccatctccaacactgaggatcaagttttaccatgaggtttagggggacaaacagtccaaactatagcaagtgtgttgtctgttatcttctttaaaccattggttgtctacagtgaattgttcaatttccacacatttgtgaattttctggtttcccttcattactaatttttagtttcatttcattgtggtcagaaaagatatttcatatgatttcagtcttttaaaatttattaacattgttttgtggcctaatatatggtctatcctgcatagacctatgctcaggtgcaaaataatgtgttctctgctatttgggggtggctgtattctgtatatgtatgttgggtccagttggtttttagtgttgttcaagttatctgtttccttattgatctgtcttgatgttctgttcattattgagagtggtatattgaagtctccaactattgtacagctgcccatttctcccttctattctgttagtctttgtttcatgtattgggggctgtgttgattggtgcatttgtgtatataattgttatagctccttgatgacttgatttttttaatcaacatacgatacccaaggctaggtgcattggctcacacctgtaatcccagcactttgggaggccaaggcaggtggatcacctgaggtcaggagttcgagaccagcctggccaacatggcaaaaccccatctctactaaaaaatacaaaaattagccaggtatggtggtgtgcgcctgtaatcccagctactcaggaggccgaggcaggagaatcacttgaacctgggaggcagaggttgaagtgagctgagatcctaccactgcactccagcctgggtgacagagcgagactttgtctcaaaaaaaaaatatatatatatatatattttttatatatatttatatttttatatatatttatgttatttatatatataacctgaagccttttatttttttcttctggacaccgttctggctagagtctctagtacagaagagataaatgcagataaatgcttactagaagagataaatgcagacattcttgttcttgctcctgattttagtggcaaagcattcagtctttcatcttcaagtgtgatgttagtcttgggtttttcatagatatagtgttatcagttgaggaagttctcttctatttccagcttgttgaagcatttttatgaaagggtgttggattttggcaagtgctttttctctattgattatgtggtttttgtttttattaaaatggtgttttatataagttgatttttgaatgttaaacctaccttacatttctgagattaatctcacttgggtcatagtgtgtaatcatttttatatgttgctaaacagtactttgttaagagtttttgcatctatattcataagggatatcgatcagtagttttattttgtttttgttttccttgtcatgtctttggttttagtattgggtaatactggcttcatagaatgacattgagaagtattccctctgcttctgttttttgaaagagtctgtgaagaattggttttaataccaattaataggaactatttagataaacagtgtagaactgatgtatgccaaggagtacagagtattttaaagacttggtgatgtttaatagcacagtgtgtgtagaggagatacaagtagtttgaaattgctggtatataaagttggggtagtggggattgtagtggagatgaggctaggaaagtaaaagtgggttcatatatgattaggtcaaggtcagcctcctagtataaaaataattttgttgtcgttgttctttttcaattagatgaaaaccccaaattacagaaatggtaccttgatcaggttgacaatatgcaattctcccctcttttcctctctctttatcttactatattatgaaaattactgatagaagtgaattttattcagtgaaataaagtgattacctatctaagttcgcttggtctatcttccttaaagttttatgttgatgtcttattaaagtggtttattgattatctggatgaaacttgactgatgaaatgctaacattttcaatggagtatgacctaggaagtgaatatataagtaataataaagctcttgagtttgaattatcaggacctcctcataaagtataaatgttactgacagcaaatgaggtggtaattatcatctgctcaaaaataatctaggagtttcttttgaatatcagttgtcatctgtttttatgttattttaatatttcagcaaaactaaaatgttattacatgcatactatataaaaaattgaagtaatacagaatggagtaaattaaaatgaaatattttttaccctaatccctaaattccctaatcccactcttaacagatataaatttcttatatgcatgtatgagcacatatattatatgtaaattagtaataacatatgtattttggaacatgttccctttttaccaacaatacagtaatagggcttttatgtctatatggacagaccctgcaaagtttcccctattgttaagatattaatatggtacatttgttacagttagttaattattatagtttattcagatgtccttggtttttgtctaaggtcttttgtttatgatcccatttgagataccacattacatttacaaagtataagaaagaataccacattgaggatccctcattacaacataatgagatgttagtggtcttatcttacttacctgcatggcagtttcttagactttccttggttttgatgatctcgacagttttttggagtactggtcagatgttttgtaggatgcctcactattggagtttgtctgcttttttaatgataaaactggggttacacgtttttggcaagaagacaacagagaggtaaagtgtcattttcatcacatcatatcaaggacatatactgtcgacatgctttatgagtgctgttaactgactttcaacacctgactgatgtagtgtttagttttcttgactgtaaaattactcttttccccactctttccatactttattccttggaaggaagtcactatgcagagactacacctaaggtgggaattatgcccctatacttcttttccttaatggtggagtagctacacaaattatttcaatttattttgcgtaagagacatgtctcttttcccccatgtattaatctatttagtcatttatttctatcagtgtggatttgtggatatttattttattggccacattgtcccaggtttggccactgggagttctgtcaactacctcctgtgcttcttgtttgtttttttgttttatttattattatggttattatttttaagaaggagtctcgctctgcctatcaggctggagtgcagtggcttgatctctgctcactgcaacctctgcctcccaggctcaagtgattctcctgccttggcctcccaaatagctgggattacaggcgtctgccaccatgcctggctaatttttttattttcacaagagacggggtttcaccatgttggccaggcttggctcgaactcctgacctcaggtgatccacccacctcggcctcccaaagtgctgggattacaggcgtgagccaccgcgcttggcggctcctgtgcttctttaacatactatcatgtgggctttttgttttattttaaagcatgtttttgttttctggcattataagataatggcatgcagatgtgtttttaatttcttgctcttcacaaattttatgcatgcacgagcgtgtacacacacagaattgttttcatagatgtaatccctaaagtgtcattgctgagtctatttgggggggctctatgtcttcacttctgaattaataacccattgcctgcccaatagattgcatgagtttggactttcacaagaattgttgtagttcatattggatggtgatctatttcaatacttagttttctcagactgaattttcttttctagtttgatagatgaaaaattgtggcttattgctatctttattacatttctttaattatgagtgaggctgagcatttttctacagttttgttggccatttttatgaccatctgttaatgcgtatttccatatttcctttcttgtttttgtttgtttgttttgcaggggttggggtgggcaacggcatgatttcgatcactgcaacctccacctccggggttcaagcaattctcctgcctcagcctccagggtagctaagattacaggtgtctgccaccaaatccagctaatttttgtattttcagtagaggcagggtttcatcatgttggccaagctggtctcaaacacctgaactcagcctcagcctcccaaagtgctgggattacaagcgtgagccaccgtacccagcctatatttccatgttttctgtttgaatactggttttttcttgttgacttccaagtactatttgtgttttaaagaaaaacaaatcaggcttttatcatgtgtagcagaagtttatttatttgtttatttgccaaattgtcatggtttttttttactgggtttgtgtgagttttttttcttaaggtagtatagatgttttacagttctgtgtaatcaaattggcattatttttctccatggcttagctcttttgtcttccaagatttgcagaaatacccatgttttcttctggcacatttattatttttctaaaaaaaaaaaaaaaccctttggtaattttggtgtttattttgttttaaggtgtgagatagggatgaaatttgccttaatcgttgtatgctaggtgcctaccctttcccatttccttcccacagcctctcaagcaaaaaggtattctcttacctaatccacacactctttactattagtactatattctcatctctagccagcctggcgtacccatcagagaaaagatagctattttggagatttttgccagttggaatgcccagtccaattctgatgagaatcctgggttactgtgatgctgcatttgatgtcttattgcggggatctctaatatgttgtattgcattacatcagatttttaaaattatatcatgattctattaaaaatgtaacctcaagtcattttatttccttgacctcagaagttatctggagataacacatcatactaatgtgttttccaaaggtaggatggagttatctcagctgttgttgagttgttgttacatgtgatcaaaattttatcacttaaatttcttactcagtgtgtggttttaatgtggagttcatagaaaaatggttatcagtgattagagaatagtttattaataaaattaataactaggaaaactgagtcatagagagaaatactccctaaattatacattatgtaatttttttggaagtttctaagtagatccactttgtataatagcagattcctttcaaaggacttctggcattgactcttttgccagttttttggaaacctagtatcagttatttgaggttagcagactcagcgttttcagctcctgcctcccaaatgatactgtgtgttctatttaggttttttaaatttttattttatttttttatttctttttgttttgttttgtttttttgagacagtcttgctctgtcacctaggctggagtgcagtggcacagtcttgactactgcaacctccgcctcctgggttgaagcgattctcatgcctcagcctcctgagtagctgggactacaggtgcatgccaccacgcctggctaacttttgtatttttggtagagacagggtttcgccatgttgcccaggctggtgttaaacttccgggctcaagagatccacccacttcggcctcccaaggtgctgggactgctggcgtgagccactgtgcccggcctatttagtttttaaagtttacaatttgtgagtattctagcattgtgtctgagaatccaaaggagatagattacattaaggaaatagcaaacctgagatgtttcagaaaattacgagtgctagaaatgctgaatcctggtcttctcaaaatattagcatctttagccttcttaattatgttgtgcaagaagcttcaaacaaaaccgtactttggaactgcaaaaatactactgttttccctacatatggtgtttcctagggatgggcactgtcccctcggggttattccctgtggctatttattttacattagaacatttgtaaatttaacaagagcattttttggtgccttcatatttctcatagtgtagtaaattagattgttcagcctatagcagacatgctttcattagccttcctttgatgtattctgctgtgttaatattatgaataaaatatgtggccaataaagggatatcactacttgcaatgcagcatgagctatacaaagtagagtggaattatcttcattgatttgaacacaatacttttgtagcctaatgttgcatgatgttttttattggttgcatctcagtgttttttctttttgagttctgttcaattacacttctttaatttccagatgtattactgtcaagtttgatctggagttcctctgttctctcattctcaataatacattgacactttgattttagtcatagggcctttgttaaatttcatattgcaggtttggtctatcataccagcccaagttctttaaatttttattcaatgtttcattttaagccattcttctaggtctgtgtcaatcttaggtggctgtgttgaaatcagaggttataaattgacagccaaatctatcccatgatgtgttttatttgacaagcacatttttttttttaaactagaatgcttgtagttagttaagttttgtactgtgtgatttaccaactgttgccccttattgcgttacacaatttggcttcacacttttacatatgttgcttagctgttgatggcatttgcaacctgtaataaatgaaatcatttataaaaatattgagacaagggaaggacagtttatagtcctgtaactagaaatctctgttgaacttggcattcatcttttaatcttacatataatttaaatatataaaattaaataaatgtgtgtgtgcatgcgcacgtgtgtgtgtgtgtgtgtgtgtgtgtgtgtgtgtgtgtgtgtgtaggagacagaatctcactgtgtcgtccaggctgggttgcagtggtgccatcacggctcactagccttgacttttcgggctcaagtgatcctcccaccttagcctcccgagtcgctgtgaccacaggcgtgtgctgccaggcctggctaattattattattattttttttttttttttttgaggcagagtttcgctcttgttgcccagactggggtgcaatggcgtgatctcagctcagagcaacctctgcctcctggttcaagccattctcctgcctcagcgtccagagtagctgggattacaggcatgcgccaccatgcctggctaattttgtatttttagtagagacgggatttctccatgttggtcaggctggtctcgaactccagacctcaggtgatccgcccacctcggcctgccaaagtgctgggattacaggcgtgagccaccatgcctggccaattttttgtttttttgtagaaatggtgcctccctgtgttgcccaggctggttgtgaactcctggactcaagtgatccttctgccttggcctcctacagtgctgggattataggcatgagccactgcgcctggttcagcctttatattcttaactgttagtatgattgtttagcaaatgaagtaaattggaatgtagtggtatacacatctccaggttgttcataattgtataatgattaattttgtaaaatggatcattaaaatcaagaaactttgtgattgagtaatagttaaaaaaatggttttgacatctgtgttaatgacctttctaatacctgagactcaccattctttgaattctatttaatacagcaatccttttcacaccaattgagcattctgttaatttgttctctttattagacctcatttacaatgggaactgattgtttctgaatattgatctctgcatttttttcttttagccttcagcattactcttgttacccctagttttgcatatcatcttatctcttactttacaagaaataggatcatcacacataactcattcagcttacatttctttccttttccctaatacctaatcacttattagatttaaagaaaaaaagataactaattttttaaggatgaaaatagctaaaactcgagtctttattgtgtgttaggtaatgtatttaaagaatttcacattgatgatttcttataatatcatgacagttctttaaaatagatactgtcattagctctatattgcagatgaggaaactgatgcttagagaggttaaataacttgctcatagttacataactcctagtaacagaattgggacttctatatagttttatgtgactcatgctaatcttacttcttaattactatgctatatagtttgtctttgtccttgtttcttccttctcctgattttctagaatcttgcttcttatcccttttccctctttttttttttttttttttttttatttttttgatatggagtctcgctctatctcccaggctggagtgcagtggtgtgatctcagcttactgcaacctctgcctcctgggttcaagcgattcttctgcctcagcctcccaagtagctaggactacaggcacctgccaccatgcccggctaattttttgtatttttagtagagacggggtttcaccgtgttagccaggatggtctcgatctcctgacctcatgatccgcccgcctctgcctcccaaagtgctgggattacaggcgtgagccaccaagcccggcctttcctccttttttataactttattctacctatgtctacttagcttacaaataaatttgggtctcttttagccagtaaaaagtgcaaacaaaagcccagcaacaatgtttctttgacttttgctccccttgagttaccaactcccagttctctccttacttcatcaccagagactttgtgagaataaactgaattaactacctcctattcctcatctgccacctgctcacttgtgaacccaataaagcttgattgctactggcaccatggtctgaaacctctttttccaagagcatcactgaaccaagatacaccaagatattgggtatagatcgaataacctctttttagtcctcatctcgtctgctattgaaatgcttcacagtttcacctctcacccttatagaaatttccactttgaattgtcgatgctaatctttccttgctttcttttgcctcttagttttttcttcatgtttgctaagtcccctgtgttgtctgcttcttaaatttagtgtttttcaggattccatactcagtcctttccttactctccaactctgggtggtcttcttaggtgaacaagtctattctcatggcttcagctattgcctgaatctcaagctgtactccactcttgcttcctgagttttgccttgacctctgtttgcaaccacctatgtaatataactactcaaagtgttctgagattcattaagtaaaagttcaaataatttttccttcaaacctttctactgtttttgctttctgtgtctcatcacctatttggttgcccaagcttaaagacagttaaattaatcccaatctctttgtttcttggattctctattagtctcatgttcaactagccggtatacctaccctgccttcccgctgctttaaaaaaagtccctattgccttatgccctgattcagcctttggactcttgtagaaggtttccagctgctcaccctgcattcattctcactttcccaagtctcctctccatacccattttccataatactgtttgagttaaaacagacatgtcagtttgtaatctaatttttttcttcaagctttattgatataattgaaaaataaaaatgtatatatttacagtgtacatgatttttatatgtgtatacattgtgaaatatgtaatactacattttttaaaatgcccattgcccttacacttaatttagtcagcaaatatttactgagtacctactgtgtgctaggcactattctacatggagatagagcagtgaataaaacagacaaaagcctttgccatcatggagccttgtctagtcagaggaagcggataaaataaaataaactatgtggttatacaatggtaagagtcatttataaagtggggaaggcagatggggaatgtgaaggtggaggaatgggttgtaattttaaatggaatgattaaggaaagccatactaagaaggtaacacttttaccaaagattttgaaggagttgagacaaatgagctttgagcatgtcttgggggagaacattctaggttaaagaattagaagccctgaagtacagaatccctgaatctgaaaatgtaccatatgtgttcaagaaatagcagggaagtagcttggctagagaaaagtaagcagtgaggacagcagtggagtagaagaatagaggacagaaataatgagatgggtgtgtagtaccttatagaccaatgaggtagagtagaagagatacagtctaacttgacttgattttagttgatagtagactggaaaggaataagggtagaagcagaccatttaggaagatattacagtaatccacgtgaaaggtgatagtagcttggacgagggttctaccagtgaagatgatgagtggttggatccagataaattttaaagatggaaccattcatatttcctggcatttggatatgagggtgtatgtgtgggtataggggtgtgtgtgtgtgtgtgtgtgtgtgtggaagtgtaagagagaaggggctgggagttgattaaggatgattctaaggttttcagccagagcaataccagatacacagttggatatactagtgtggagttaagggcagaggtctagtatatgtgtatgtatttatatataatcagtgtatagttgtattgagtcattagactggatgagattatcaagggggagtgagtttaaagaacagaagagatctgaggactaagtccagggatcttccaatttttaagagatcaaggagaataggaggaagcagaaatggagaaaagaagagttgtctgtagggtaggatgaaaaccaaaaaagtatagtgtcctatgaagtgaagaaggtgcttcaatgaaaggaacgtgattgacttttccaaatggtagtgccaagtcaaatagatgagaagggtaacatgatgactgaaaattggctttggattcagcaacaaggagattgttcatctggaataattttggcatagtggtagtgaaattctgttggagaaagttttagaataggaggagagaggaactggagaaagccagcttaaggagaggaggcagaaatatggtggtgattagtgtggttagagatagttttttttttttaagatgggagaaataatagcaagtttatgtgctgattgtaatgtttccacacggaataattaatgcagaaagacaaaaaaaattctggagcaatgaccttgagtacaggaccatttttgtttttgctttaacatgtagtgatgtttgccttaggaaggagctgggttagcttatctctagttacagaagtaaaataagagtatatggagatagatgctggtaggttagtgcttgtagtgatgcaagcaaggtcatctgttgaggctgaggttagagaaggagtgttagaggttgaagaggaggaaagaagaaattaagtggtctggaaaagtgaatggaccaggaaagtgtataattattgctggacaaattgattttgagacaaggtgtggctctgtcacccagactggagtgcatggcatgatcttggcttattgcaacctttgcctcccaggctgaagccattctcccacctccttctcccaagtaactgggactacaggtgcacaccaccacgcctggctaatttttgtattttttgtagagatggggttttgccatgttgcccaggctggtctcaaactcatgaactcaagcgatctgcctgcctcagcctcccaaaatgctgggattacaggcgtaagccaccacgcctggctaacaaattaaattttgatgatgacttgaacatgacaccagtcagcataattagaggtttctttgcagccatgttgagctctttggtcgtagacatggactgggcagaaagctgaactcaaccagggttgtggaaaaaccacaagctttttcttagatatttttggctttgtgggctatctagtctctgtcacaattactcagttctgtcactgtagtccaaaagcagccatagacaatacttaactgaataggcatagctctgttccattaaaagtttatttttaaaaacaggcagcagactattcctgttgtttgttaactctcgtgttagagaggataatgatggaccgtggaatttaagcaggctaagaagggaagagaggagaacataagtgcgtgaagtgtagagagaaggtagtagggtcaatggcatgatgtttcactatttcctaatctctgctctactcttacatgaccttatgttttgaatatagttttctctctctgcgtgaaatgcttcttttatacacagtttagatgtcatctcttttatacttttatttcctctgctgtggccactgataatatggaaaatgctcagtaaatgctgaaaattgaaattctccacttcagtttgataggtaagattatttcaaattgggagattgtgaaagtttgtttatccacagtatttctcactcagtagccaagcctatgcttgaacatggtgattctcaactttgttttctgcttcaatttacctgatactggccacatgaacaaggtaagggcagtgccctgctcttccttcctacttggtgcttaagttagaatgcctttctttttctccactggtgttgttgagttggtgtctttatgctgcagagcatggatatttaagcataggacctgtaatgagcttgtgagtatggtaacacgttgccttataggttattttttaaatttcagttaattatagaagacaagtgattgttctatcagttatatactatcaggtaactataagatctttttgtgtgtgtgtaggttagagacattttggactgtttagtctgacttttcatattgtagttgaagaaactgaagcctagagatgcaagtgacttgcacacaccaactagcagagctagggctagaaatccatgtttcttagtttcagattcagtactctccctgccaccacgatacttatcttaataggatatgaggacattgattatcagcctagaaaatattatattttatgacaggtgatatcctctaaaatcatggtaaccaaaataatcgtttaaatgtaattgggaatcttaacaatattgaaatgactattttttccccattgaattattagtaaaaaggtgtggttgacttgttttattattatggttatattctgaagtaattttatataattaaaagtgacacattaatctttaaaaatccgaataagtaaatatctagagaatttactctaatttgaatatttaaagaccagtttctaatctgttttgttttttgtttttttaaataaactctttcagaaagatgaggtctatcttaatctggtgctggactatgttccggaaacagtatacagagttgccagacactatagtcgagccaaacagacgctccctgtgatttatgtcaaggtatgtaaaaacataacaattttccattttagaaaacattttttatgaaccaaggagagcctcttttatgttttaactatattattgtatttaatactcagggagaaaaactgtaaagtaggtattgttggaactttgttaaatccttttacagttttaaaatgtgaattgtgcaccttttgaagttttataactcagatagtaaagatattctggtaaattacagtgaatatttttcacagacatttatagattttatttctgctagccacagtacattttaatttaacttctgatatctttattgtgccacaaaccaaaataggagcgtatcatataaaattgtaaaatatagttataaatatgttcaaattcatttgttcacagatgccatttatatattttttagcatctgtagctgcagcttaaactgttggcaattttaaatatgcattgggtgttgtttattttttggtatctaatatcaatgccatcttgtttatttcctagaactcatggcagaatggctaggtatttatctagcataatttgtattaaagttgtggttagttattagtaacaaattattttattaactatggcattgtgaaaactagtagttaagtttgaaagttcacatatctaaatacaatttttaaatttaaccctttatggaaataactgtagaaaataaaatgtcattgactctgaatgtcttatggttagagtttttgaagtcttgttaaaaatttaagcttcacaataataaaagggttatcaaagtagaaccattaataatagaagttctttggatggattttgcataagctaataataataataataataatagaagttcttcaagcacttttgttagctagattactttggcaaggagtcatatatatatatagtatatataatatacactatatattgtatatataatatataaactatatatactatagtgtatattacatatttatatataaactatactatatgtagtgtatatcatatatttatatataaagtatatatatactttatgtatagataaggatgttcttttttattatttttccctcctcccttccttccttccttccttccttccttccttccttccttccttccttccctccttccttccttccttccctccttccctacctacctacctacctacctacctaacctacctccttacctacctacctccttccttccttccttccttcatttcactctgttgcccaggctggagtgcagtggcacaatctcggctcactgcaacctccaccctctgggttcaagcgattctcctgcctcagcctcccaagtagctgggattacaggcacacgcgaccatgcccagctaatttttgtgtttttagtggagatgtggtttcatcatgttggctgggctggtcttgaactcctgacctcaattgatccaccagctgggactccccaagtactgagattacaggcgcaagccaccacgcctggccaggatattattttttaaaatgtaattaaattaccattgtcatacctatgaaaataaatggtatttcattagtgtcattagatacccagtttatatttgcctatgacataatttttttaagtttatatttttgaattggcattcagttaaggtttatatactgtgattggctgatgtgcctctaatgtttcttttaatccataggttctctttttctctctcttgaactttgttgctaaagaaaccggatcatttgacctatactttcttggtctggattttgctgaatttctgtagtgtaattagtatgttctttggtcatctatatttcctgcaaattggtggttagataactgataattaaatatatttttggtaggagtcaggaccacttcatttgtagtattgagtgctttctgaaggaagaacataatgtctttcttttcctgacgttagtagccattgatgatcactgcctaaattcattaattcattaaaggttacaaaatgttgatagtctactgttattattccttcttaatttataagctggaatagtttcataaagagagattttcccatatcaactatttgtgccctgagatatagtttatataaaaagacaggaaatgtatttgatcccttttctttatttacgaaaatttataatagtctattccatagcatcctccataggtaccaatgaatgaggtgttttgttgttttaaagtatcttatgtgagtcttaataatatttgaccgtttccttgctttctaacatgacaaagtattccaagttcatcttacacatttcttcctcagacttagaatcaaccttttcttcaagaagaccttgttcttttagtgggaggtggtatttagagaccacagtctggatgctagaggtgctaattgtcacgggattggttattgtttctgggtctttttagcgaacagagctaggaaatatgtgggtaattttctcagatgtaatgcatcttctttttttccaaaaataaatacaccatgagttcatactgatactttcaaataaaatcgatgagtttttacttaactgtaataatcttatatttgtatttcctttctcttacattgaaaatttcatttctcaatgatagtagtataattaataacttattctacccagcaccctacataaccatcttagaataacaattccaacactaggaccaccagctaaaaataatttaagatctaagcacagctcagttttacccattagatcccattagggatgaacaatcaaatttctctgttctaaagaaacactgaggtcaggcacattggctcatgcctgtaatccagcattttgggaggctgatgtgtgcagatcaccagaggtcgtcaggagttcaagaccagcctggccaacatggcgagaccccacctctactaaaaaatataaaaattggctgggcatcctggagcacacctgtaatcctagctactcaggaggctgaggtaggagaatcacttgtacctgagaagcagaggttgcagtaagccaagatcatgccactgcacttcagcctgggtgacagagcaagacttcatctcaaaaaaattgaataattcctctctgtgtgatgatgttccattaagcatttgtttgtttcagtttacttttattatagattgtggttttctaaattttcaaataaaatttactttaaaattcatataaaatatttatacatagttcaaagcaagattgacaaaacaaggtatgttcaaagaagttcagcttttatctctgttccctctgctctgttcctttcctctaccagtgttaagtattttttaagtgttcataatttatcctaccatttttaaaataagcaaacatgcagttattcttactctttttatataaatggttacataaggtacacatttttctcttttttttcagttaaaaatatgtcctagagatcagtccatattttcgtgtgtgtgtgtgtgtgtgtcaccttctttatggctaccatattacttcatcatgtggctgtattctagttaattcacccagtgaccaataatgcacatattgttttcctcttgttttttgttgtggtttttttggtttttgctatagtgaacaaccctgtgcacttacggtatttttgccagcaaatagttgagctagatatctggcatcctgtattttaaaaaagaaaataaaattattgtacatactgaagttggcatacagagagaaatctagcactcctttctttctcccccttgtgggaaaagggatgatttttcttttttttttttttcttttttttttttcttatgtaaccacagcgctttcagaggccagatctattggctctgggcattattctttggggacatcgatcccttttatctgaaaagataaaaacagtgtctggaattgatgagttatgagttgatctccttcacgtagtcattctacatagttttattgtaatcctattgtatgaaaaatgttagattgtgagagcgatataaaagtagtaaatgcaagtaactcttgccttcatgaacctcatcatctgataaggacttgtttggcatacatgttaccagaatggcaactgcatttctttataattgcctttcactttttctgggagagttgagtattttctatgagtaatacacaggttaaaaactgagcacctttgcttttctgatgagtatatttcagaacttaagtaggttttaaaatgcaactctaaaacagatgactggcaaatcattgttgtgaacttaatttttttttaattgaaaatacatgtttaaggacagggtctgatcacacaagagagttggatgcattttttgaatcatgaacaaaattgttattacttgttttaacatgtattctattgttttattattttattacttcagatattatggcacagagaagagggcattggatttgagttaaatataactaactgttcaaattgtgctcaactgcaaaatacattcctttctgtgatattttgtcctgtaactgaagcatagtaattgttttatggaaatgttaacagttttgtaccaactttgaataaaatgaaaaataaaaaaaattgttttcattgaacctcaatatcttctgtaaaaacagggataatgtgtatctcagagtggttgcaagaattaactaaacaaataggcaaataggcagaaatgcttttcttggtttggcacttagtatatgttaaatctgttatattttaaagtgtgttaattatatttgagtttctaagaattaatcattctagtcttttatttagccaccaaactgctttttttttgttttgttttgtttttgtttttttgagagagagagaattccgctctgtggcccaggctggagtgcagtggtgcattctgggttcactgcaacctctatctcccgggtccaagcaattctcctgccccagccttccgagctgggattacaggcgtgcaccaccaagaccggctaattttttgcattttagtagagacggggtttcaccatgttgcccccagggtggtctcgaactcctgagctcaggcaacccgcctgccttggtctcccaaagtgctagggttataggtgtgagccaccgcgcccggcctccaccaagctatttaatgattatattttacacctttatttaataaaatatggcaaaatacataaatagtaattgaaagagaagcacttactcaaaccactacagaatattgtgtgtgtgtgatattgagcaagttgcttaatctctctgggcctcagttattttatatttaaaatggtaataatattagtacttattacataaggttattataaggagtaagtgaaataatacacataaagcagttagaacagtgcccagcccatgataagttgtttttctgttcttgtttttgctatcattctagtctagaaagcctctcagctttcttataaatacacttttacaaagtgaaataacaacaaatatataatattgcatatttcattctttatcttgacttttctagataaacttttcaaaacaatgaagatagagtagatctttcagatgaaagaatacagtaaaaagacatcttaaaattaacctcatttaaacgattaagctttttttttttaaaaaaaaaaaagaaaactcgttttcactgattcttgcagacctagacatcaataccctgacacagtaaaatctctttttttagtaaatttatgcctatgaactcagtttcttatgggaggttatctttttagtggtaatgaattaaactcctacagtaagctttaggacttagaaatggattctgtgaatgatggtacaataatagaactatgaagtttttaaaaaatgttacatggatacctaaatgccttaattttaactttgttggcaaaatgctgaccttataaaagatcttatctgtacagtttacatcttgcttcattttaaagaaaacataaacttttccagctaatagttcacattaacttcaaggatgtactaaaattcagctgtctgcagttttcaccatgcttcttagaatgaaagtaggtttcatgttaactttaattaacctaagccttagcagtagcttttaaagatggtgccatatgtcaatgcttcattagacttttaagtatctttttttttaattgtttttttaccaagatatttattatctttggtttgactcatttcaaaaattctgtccatggtgtaactttggggtagaggtcagaaggtaaacagccagaaaagtttaaaagtgaatcagaacactgaccttgagataaacagaaggtttaaattatactctcttcgtccatgaagtttctctctcctccagtcaagagtctgattctttactccatgcagacccagtttctcagtgtatctttttggtaagaaaactgagaaagtcttctcttttgaaagatgatgtcaatagtcaggcatctgtttttgaatgtcattttgaattatactttttctgaaggatattaacaggaagaatggtgatgctactaacagggttattgatgtcttgatagagcagtgattacagattttctcagtccacatgagttttcctagaccactgtatcaatcaccttggaggctgacatctcagaagaatattctaaagatcacactttggaaatacgtttacattcagcagcatgctctactagaaagaactataaacttaaaaatcaggagacctggtttctggcccaaagttactgattattcatgatttggggtgcctctctgagcttttcatttgtgttttaaataaaagcccatcttagcaggcttgtaatgtgagatgttagtaaaattaaaagttataaagcacattgtaaaattttcttcttttgagttattaaagaatgaagcgaatagtacatatggttaatgacagtttagctaattcatatagaaatagctaattaatacagaagtgacacaaaacttgtgaaaggaagattgagtgccagtaatccatagcatttcacctgttcttttctgagaatctgttactttattgactgcttaaggattctgatttgtttagaataggaagtatttaattaatttctactatctattccagttgtatatgtatcagctgttccgaagtttagcctatatccattcctttggaatctgccatcgggatattaaaccgcagaacctcttgttggatcctgatactgctgtattaaaactctgtgactttggaaggtaagctactgtccctctccctgccccttcccttttcccctcctccccctactatcttcttttaaatatattccttttgcaatatcagcctaaacacagtaattcttattcaagaagtataaactagtgcagctgtgagagtagttttgttagtttctgtcaaaattataaatgtatatactccttcatttaacagtttaacttttaggaattatttccttaggaatacatatttacaatacagtgtatatatagggatttttattatagcattgtttataagcatccattagtaggaaaatggctaaataaattacggtacatgcagagtaatacatgcaaccatgaaaaagaatgaggcaactctctgtgaactgaaagggaatgatgtctaggaaacattaaatgaagaaagcaagatcaagagtatatgtattgtatgccaccttttatgttttaaaaacatacagaatgtgactatatatatatatatgtacacacacacatatatacacaagtacatgtgtggcttatttctgaaatggtacgtaatccataatatttgattgcctgagaaaggatctttgggaatataatgtagttgggaaactcactttttcattgattgtattttagtattgtttgaatttacattaggtatatatactcctttttcagtaagaactaaattttttcaaaatattgattattatacattcctgtgtatctttttaacttcacaattaacctcaattcagggatgagataaaaaacaatgcagtgttttcttcattttcctctataatttaaccttttattccaccctttttcctgcaaatttcatcaaactttctgcttttaaaagctcatttcttggtaatatactgtgaatttgtaatacaactttattctttccattttcagttttcagtactttgtgcctctctgatctaaccttttaacatgtagtcaagcctacattcccatgtaactcaggcagttaccccgctacttcctcactggtgtaatcacctaatctctctcctcatggtccctaagacatctttacataatttggattctctccaatttaattttttcacccttgttacagattcttttcaccatagctctatagataacatattgccccacacttgttaatacctgtgttcctatccctttgtaatacttttacatcaattcacagtttaaatttggggtttaacataggatatgttttccacaggcttctcttgagacagatcctttaaaaaataagtaaatctgttctgtcatgagttaatttttcttagtctcacaatgtgtcctctttcagactgtcctcattttactgttttctaatttcagatgacctatcactttgcaggccatgactctgttccctgaactatttttaaaaagggtgaaagatagtaaaactcttacctggtgtttgaaacaaagcactactacttgtctataggaaaaactgcccaaatcagatatgttttattgttaatggggtgtcttcaccattgagagtgactgacttggtagggacagactgagacaccaaggttagaagagcttctgttctcatatagtgtcaaaacacttggtacagcccattctcttgggacataaaatagctttattctgataaatttggaagagggatttcgcttgtttgatagctcatttttataaaccctctgatttttttgtttttaacaaaattggtttggtcagatggagtttgggaaacactttggactgtacattatcagattggtaatttgaacaaaatactattactttcttcttatttttttactagatgaaaaggggccaaaaagtagctaaagaactagttgggctatttaggaacaaaaagctagatgtgatcacaatattgggaagtagttaaaaccagtctcctctgtaagagaggctgctccgtttttgtagctccatcaggtagtgaaaaaacttcaggctacaaagcttgggtattaacgttttgtctcgtaatgaattttctgaacataattagcatctatcttgttaattaaaaagcatcctttagaagatataacagtctcctatcaattatgctgaaaactaaatgtcataattttcatgcagcctaaaaacagggattagtatttattaatttatgaaatggttattgtatgtcagtacttggggagagggttaaaaaacaaacttcaaaactagtgatgaaggaaaaagaagttaaggttagagtcatcattgactagaaataaatggaagaaaagaaatcccagtcattgaaatccttgtgactactttcatctgtctttaccctggttttccagtacctttactttttttttttggcacttactgttttactgttttgattttgttgcattttgtccctttatttatctttattattaatgtatgtcagaatggctggcttctacagcagtttattttattctgtctttggattatcttgggcgacatctcaaaagaaattaattgtaatttattatacttcatatttaaaatacatgcaatgaagtattttagtaggaaaattggaataagaaaacatgcaattatacttactatagcagagttagaatttataggcagtgaatcatttctgccctgaagttgaagggcctgtttataatttattgggtaataaatgtttatgtggttaataaattgaccaagatatggaaaaatagattgagtctataagccttgaaatattcgccgtgagtcagaagtcaaaatgcaagacagtggccagtttctcaccctttttaaagaaatacattgggtgaggagtattcattcttagaatccattgtcatgctttttggtgggggaggtacctcttttctgcccttgcttctttgtattttagaggtggaatttggggaacagaggatcagaagaaattcaacacttatccttttttgcttttggtgccttcttaggtgacaaacgctttctttaaaaattgctattcttttttgcagagcaaggtgataaaattgtaaatttcttttattagagatagttacagtttacattttctttttcatatatgattcaaatgatgtgaatcttataaaatcatttgatactgtgaaaggatagcagtctaagttctttaaggtttagatttaaagaatttctgctttttatttttattttttttctgttagtgcaaagcagctggtccgaggagaacccaatgtttcgtatatctgttctcggtactatagggcaccagagttgatctttggagccactgattatacctctagtataggtaagtacaaatctgaatataatgctcataattattaattgcttcttgattttggtaatttagtactactaatctgtacttttatttccatggaaagatggatatatcccataatgttttttttcttaaagcttgagatgcaaacatgtataggcatacctcattttattatactttccaggcactgcttttttttttttaacctctcaaaggtttgtgtcaaccctgagtcaagcaagtctgcccacactagttttataagagcatgtgctcacttcatgtctttgtgtcatcatgtctttgtgtcacattttggtaattattgcaacatttcaaacattctcattgtatctgctatggtgatctatgatcagtggtctttgatgttactattgtaattgttttggtttgccacaaaccacaacaatataagacagcaaacttaatcgatcggtgttgtgtatgttatgaatattccaccagctggccattccccatctctcttcctatcctcaggcctccctattccctgagagacaacaatattgaaattaggccaattaataactctgcagttgcctctaagtgttcaagtgaaaggtacatttttcacttttaatcaaaagctagaaatgattaagctgagcaaggaaggcatatcgaaattgtgccacacagttagccaagttgtgaccagaaaggaaaagttcttaaaggaaattaaagtgctactccaatgaacagatgaatgataagaaagtgaaacagccttattgctgttacagggaaagttttagtggtttggatagatcaaaccaaccacaacattcacttgagccaaagcctaacccagcaaggcctgaactcccttcaattctgtgaagacagagaggtgaggaagctacacaagaaaaatctgaaggtagcagaggttatttcatgaggattaagggtaaaaagctgcaccatgccataaaagtgcaaggcaagcagcaagtgctgatgtagaagctgcagcaagttatccagaagatctaactaagatcatcgatgaaggtggctacattaaacatcagagttttaatggagaccaaatagccttctactgaattggaagaagataccgtttaggactttcatctctagattttctagagatggaagacttcttctagagaggagaagtgtcattgcctggcttcaaagcttctaaggacaggttgactctcttgtgagggcctaatgtagctggtgacttttaagtgcaagccactgctcatttaccattccagaaatcctagggcccttaagaatgatgctgaatgtattctgcctgtgctgcataaatggagcaacaatgagtggatgatagcacatctgtttatagcatggttcactgaatatttgaagcccactgctgagacctactactccagagaagagtatttctttcaaaatattactgcttatggacagtgcaactggtcacccaaaggttgagaaatacatttgtaaggctatagctgccctagatagtgattagtctgatggatctgggcaaagtcaattttaaatcttctggaaaggattcaccattctaggtgtcactaagaacatttgtgactcaatcacatgaacaacattttggaagaagttgattccaagcctcatgggtgaccttgaggcattctagacttcagtgaaggaagtctctgcagatgttgtggaactagcaagagaactagaattagaagtggagcctgaagatgtgactgaactgctgcaatctcatgatgaaacataaacaagttgcttcttttatggatgagcaaagaaagtggtttcttgaggtggaatctactagtggttaagacgctgtgaatattgttgaaatgacaacaaaggatttagaatattacataattgtagttgataaagcagcagcaggggttgagaggactgactcccattttgaaagtggttctaatgtgggtaaaatgctatcaaagagcatctcctactagagaaaaatctttcatgaagggaagagtcagttgatgtggcaaacttcattgtcactttaagaaattactccagccacatcgtatagccttcagcaactgccaccctgatcagtcagcagccatcgacatcaaggcaagaccctctgccagcaaaaagattacaactcactgaaggcttagatgatcattagcatttttttttagtaataaagtgtgtttaagttaatgtattacatttatgtttttatacaattctattatacaagtaatagactacagtatagagtgaacataccttttatatgcactgggataccagaaaattggtgagacttgctttattgtgtcttattgttatggtctggaaccagttctgcaacatctctgacgtatgcctgtatagaatttttcaaattctactttttagaatttaaggtatacctactattctatttttcttccttggactgttagaatcataaagctaatagcttttaccttaagaatttaaattaattctaagtaacttttttttactttcttatttaaaatcctcctgaaatacttctgagcatgattatactagttggataatttattaattaatgttatttcattaagttaataatgaaagtgatagtatggccatattgctaacatttccttcatgccatctccattatttaatataaaatcagcttaaatcactagtagttttgctagatgcactgattctgcagaagtatgcacccaagatgtttagtcatagaaggaactgaatagagaccattagctttaatcatcattgaccttctcaagtcttcaccccagatgtttagtgataggaggaactgaatagagaccattagctttaatcatcattgaccttctcaagtcttcaccccagatgtttagtgataggaggaactgaatagagaccattagctttaatcatcattgaccttctcaagtcttcacccaagatgtttagtgatagaaggaactgaatagagaccattagctttaatcatcattgaccttctcaagtcgtcacccaagatgtttagtgatagaaggaactgaatagagaccattagctttaatcattattgaccttctcttttactacatcttagcccactagccaggagtgaacagagagagcatgatcagctggacatgaataggaagctaacaaacaaggagcaactttaagctggatgtgcaagtggaaaccaaaattattttactcttacatattgtttctgaagagaattcctttagtccagaaacaaacaaaagcatgcaaataataaaccaaaaacatccccacagtaacagaaaaccaaaacaaacaaaaaacagacctggcctggtgcagtggctcacacctgtaatcccagcactttgggaggctgaggtgggcagatcacttgaactcaggagttcgagaccagcctgggcaacatggtgaaaacctgtcactaccaaaaattagccgggcgtggtgacatgcccctgtagtccccgctacttgggaggatgaggtgggaggatggcttgaggccaggaggcagaggttgcagtgagctgagactccaccactgcactccagctcggtgacagaatgagaccccccctctcaaaacaacaacagcaacaacaaaaaatagaacagaccttgtgacagtttttttgtctttttgatataaatagaaattctctgatacaagcaaacaccctaatcagaaacacattatcattttttattttgccaaatggcaaaatgccaaagcacattttgatttctgccaagaggccagcagttttacccaccatttcctttgtaccctcagtacaaatgttaacccagtgaaggtgtattcttatgaaaagagttttgccctctgggacatctagaaatgtctagaggacccaggtgcaaagagtacaaagtgtcctctgtagaccacactttgacatctgctttaccagagggtagagagcataataatgtgtatatgtatgtgtatgtaattctcagagtcttagtatggctgtggtacatggcatatatgaatggacagatgaaaaatagtacaaagaatattttgcttgtggtcgacctgggtttgagtgtcaggtcacttgaagtaaagtggagattactgacagttcttttctgagtggctgtgaggcttaaataaaatgttagtgaaaatactgtagaaatgaaaggtggtattcttttgtggcatttttagacttgactctccccaagagcaaatttcagccccttgtctttgggtatgtcattggattttccagctgctttacattttattcaaatatatgatactgattatctgtatataagatactggtgtgagctgtgccagaaacacctaaaataaaggcagtttgattgttctcaaaaagttaacacatcatctcacacattaaggaacagttatataaacaggagtcttttgaaccctagcaagcctaggtttggcttcccattataaacttaggatacttgcctcttaagactgtaatgtttttaaacagaccctcccaaaaagtatactaatattgttacatttttaaatgtttttaacagtaatgtttgaaatgaaagagtaactgtttctgacaagattattgtcatatttagatacagccagaggtaaagctgatgtctctgattatattatcttactgacaaatggcagaatgagaacaaaaggcttccttagaacaaggaattgaacttacagacagacccttgaagaagctgttattctgtgacagtgagacagttattcaagagagtggtgttttgattgggaattgagaatgattccaggcctagctctactattcagtacctttaccttgggcaagtcgtttaactttatcatgtcttaatttccttatctatgaaataagtgtgttaaactagatggtcttgaaagatcactttaacatgaacccgagttaaatatgaaacaaaatgctattctggctttaaccccaactaactaaaattcagtgtgccaaagcactatttctatttttccggtaccttctatttagttgaagttttattctatctggagaatttcatccatttgtcctttgaagtaagagcagaagagattttagtgtcctccagaaagtgattgataagtaccttgtttttactaacttgactgatgtaacatgaattgagggctgctagtatagttgtcacctgaatcttttgagtgtcagtcttctgtgataacttctaggcaagagtattccttgatgttttactttttgtcttccatatttgtagctaaatcttacctaagaaagtgtttcctattgttttttatgaaggcataattattcccttacaattttttcagccttgtatctgagatgaatcattccgtattagagaggaaaaaagttgagtgcatattaccttccatcttattaactaggtaaagggatgttttaaaacttagattaaaataagcatttacataaataaggagatacatcttttccgcttgactataacagttagtattactattggctttgagtaaagattccctaacaagttttcatatgtgcttaatttagcaatttcctaatatattaaataggactcttggtctatatttgcagaatagatgtcttggttattaagttaggactggacaaaatcaactcgagtttgttaaatgatactatgtcatttttctaggtcaataaaaagtagtcactggagcaacgatttccagtctctcttgatagtacatctcaccacatcagacctttaaaattttttgttgtcaaccatttactgttccttcttctccttccgtactggtaggtggtaaagtccagcaatgattcatattcgtctccctaaagcacttgagtgttggtacattaaaaacctaggaatctcagaaatctggaagctaaaaagcagccttttcttgtaggaagtcttaatagcgggctttaaaatagagtgaccgtacggtttatcttctaatccgataatacttttgagagagaaagaggtgttactaataattatcccaggacaacatataaaccataactatcctgggtaaaccaggatgtatactttaaagtatttttaaagtgtattaattgagttaatttttagagttttctctccggattgaggttttcattttgacttaaaagtggattatttttataatttatgaagtaaaatgtattcctccatcattgctattccattttatttaaaaatgatatatttaagcacatttttctgtcagtcatcgtagaacataaaaatcaaccatttaaagtcttaaaagtgttcctcagaatttgcactgacttaaagcccagtgtctgggagagattgaacctttccttgctgctcctctgtaagtacctactaatatgcagacgttgtgtcactttgacttatttttaagtaagataaatagatagtcctgccatagctttggtactgtaatcctctgtctagttatttgaagacttgaatacctgaaatttgataataatagactttaccctttattagaatattcttattggtctggtttcctctttggtaagtttaacatttaattaaaaagtacattaaggaagtttgatgactttttctctgttttggattgtataatcttttcctgtgatatttactctgtgatcaaagtaaaattagaaaacgtatacaaacacttttcagctcaagctatgaagtattaataaggcttcgttttcttttctctttagatgtatggtctgctggctgtgtgttggctgagctgttactaggacaaccaatatttccaggggatagtggtgtggatcagttggtagaaataatcaaggtgagaaggttgaatcagaatatttgaactggaaggaatttttgtgctactttaataatatatatcacacatgtacacatacgagaaacttaaaaaatggaggaagcaatccaaggtcacgtagcaagttcagctataaagtgggtataagaacgcccccccagccttttggtttttatttgagttactcttctcttgtatgatcctagaaaagctattatgtatatctgatgcaagaaaggtatatatctgttatttaaagtacttaaaagcaaaattagactataagctcactaaaatgtatgtaagctgaataaaagcagaagctgtgtctgcttttgctcactgtatactccctgctcctaatactctgtggagcacataggagatacttgtatttggtcactatttatatttattcagtatttataaaatgaaagaatgaatgcctacctgtctggctagatcattgatagaaacaaaattttgacttatggatttaatataattttatttattgggtctatatgaatttaatataattttatttattttaaattttatttaaagctgaataaagatatgtctggttttgctcagacacagcttctgctttcattcagctttgcatacatacacctttattaacaaatatttaaatattatcttagaatatatgttttcttttaagaacagtagagctgagattttaattgagtttttaaatgtaatttttttaagttttaaatatttgagatcttaaaggaagtccctttacttaaaaaaaaaaaaaaaacctagtgtctagatttatatcactagattgtttcattctaaggtttcagtttggacaaagcaacaacacctactgtctctggggctttgtttgtgatatcccaaattttgcatagaattgtaaaattgaaaaatctccttagaggtcatgttgtccaatgtacaataaaataaccttttagttacattcctaacaaatggttttctagtattttcttgaacacttccagcatcagattactacttagggatgcagcttattctgtattggacagcttgaatttagtttttattgtactgagctgtaactcctcagtagcttctaccagttgaacataggactgtgatcaagttcttttcaaatccttgtacttcattctataaaaataggaattttaaaaatcaaaggtggttttgctagatgtcagtgtgtgcaagtatggttgaaaagactagtgtgtaataagcgatcttctttattatccatataatttcttacaatttgcagcttagaccactgtggtatttgcatcttctttttggtaccatttttgagtttcctatctaatcttttacacttgttaacagaactattttctttttcatttctgtgctacacttagatgtaaatttgaatagtttgctttctttattttctaaaagcctaccccatcatgtaaattaatgcttgaatacggagcttggccaactttttctgtaaaggactagataaaatattttaggctttgtgggccaaaaggcaaaatcgaggatatcatataggtacttcagtaacaaaagagaaaacacattttcacaaatttttttattgatgaagttagaggtataataattgagtcttttttttatttttatttttaaatacagctctactaaccagaagaattgagttctttttggggaaatataacctttctcttaattgatgttcaaagttagtactttctaatcatcaaattgatggcaaatctgttaattcttagcttatgggcttcacacagacaatgggctgtagtttcctggtctctgctcttacacaaccattcagcatttctcctgtccctaggcttttatttgacgtacttgagctcaccatcaccatgctacaattctgtgggcatattagctattctatttgtcatatatgtttagctcattacaattgtatcatttctctactgattatattttagaattttgtggcgatttgtcattaattttaattcatacataatgcaagtagaatttctgaggaagctaagtgagcatctgtgataattccctatctcatgcttgccgtaataccttataaatctttaagtctagagcttgtttgtacaactttttgttagtccttgtaattcattttctgctaatactattttatgctacctgctattaatatattttgttactgataatttcagacttcattttcattaagtgcttattttttccaaaatggtccgtgatcaatatgtagtagcaggccaactctgaaataaaacactcatcatttatgtgctatgctgtcatcttgcatttatacttaagaaatgtacttatcaccttactatagtaagtaagttccaaaatcactgcttatagaaagttttgataatgatataagataagagaactgtaagtatttccaagcatccagggcattttgggatatctggtttctaggtgccttctatgttcttgaccgtggctgcccaggatagatggaattaccagtagtagtttaccatccatttattgactggaagttaccacacattgcacggaggctctaggctttgtattttgtgcaagtgtgtatatgtttagtatagttctaagtcttattgcatgaaggttaataaacttcataagagtgttgtgtgtgtgtgtttaatgtagccccaaatcttactggtccggccaggggccgtagttcacgcctgtaaccccagcactttgggaggccgaggtgggtggattgcttgagcccaggagtttgagactagcctagggaacatggcgaaacccagtctctacaaaaaatagaaaaattagccaggcatagtggcacatgcctgtagccccagctacttgggagcctgaagtgggagggtagcttcagcccgggagacaaatgttgcagtaagccaagattatgcccctgtactccacctgtgtgacagagcgagactgtgtcaacgagtccatcaataaaataataaataataaatatcacagccaagcgtggtggctaacacctgtaatcccaacactttgggaggccgaggtgcgcagatcacttgaggtcaagagttcaagaccagcctgaccaacatggtgaaaccctgtctctactaaaaatataaaaactagccaggtgccatggcgcacacctgtagtcctgggtactccagaggctgaggcaggagaattgcttgaacctgggaagcagatgttgcagtaagccaagtaccactgcactctagcctgggcggcagagtcagactctgtcacaaataaataaataaataataaatatcaaatctttttctttctccttccttcctgcttgcctccctccctccctccttcctattattgctaacatctgttcttcaaatgttaaatatatatgaggtttcatttgaataaaaattcctaagaaatgctgatctagctattctagttttcctgatttaagttggaaaagagaagttatatgtgtttgttttcaaagttaaatgttattaagacgttctgtattttaaacaaatactttcatgtactgataaacatgactttaagaatagatttgaaattttcttaaaggtggtctcataaatgcccagttcagttctcacgttttttaaggtaatagtcatgcacccttagtgcttatgataagtagggaactcgtattaaactgttcttttctgctttcttttcattttctttctagaaaacctcataagagagtatctgggggaaactaaccctggaaaaatggataactcttctctgaatttaagtttaagcaaaaaaaagaaagtggataatcatataataagctttatgaagtttttttatgtggtagacttgcctcattattttataaacttttgcctcattattttataaactttctgagcagggacttttttttattcttatgttttaatatctgagggcaccaaaataattttcaattaaggtttgtattgaattaacttgttaaaccattgtccattcatgaatttgaaataagctgggaattaataagaaaagttaatgtggttgttgtgtatgttgtttattgactcagatgtccatgccagtaatttacagcatgagtaaaacagtttaattaaacgaactgtatctcattctagctaacatttttaattttcctcactgccctctaataaggtttttgtaaaatatttagaataaaatccaaatacattatctttagaataagttaaaagtataagaacagatttgaaagtcatggaaaatcatttctaagcatgaaaaacacaagtatttaactttctgaagttaatttcatgcatagaattgtcagatcagcatttcattatgccatttgacctctacatatcaaaaatgcttggattttcacggcatttgtaaaaagacaaattccattaggggcttctcagacaatgtgctttttttcctttaaattcttccttaatataaaaacctcaagaaatatatgatatagttccagatacatgggaaaaaataaaatatttttggaaaatctctaccaggaattttgccaaatgtaatgttcactgacatacaacattgtcctttggcacctctgcagttggccatagcagtggagctttgtagaagagagtcctgtgcaggcttgtataatgctggtgaaggtgataatttttaatgacagttactttttttataactacatagtcttagattttatatgctcaatgcagaagactgagaaagcacagacaaatagacaaaaatcacttactgttctagcacatcatgaaaaatacttctataaatattttcatatactatattttctttttatttaaataaaaataccatcttactgctttgtagacttttaaaaactgaacaattaagtatattttttaatgactacatagattccactgcatgattgtattttgaattacataattgatgctgaaaataacagcattaaggtaaagtgatacagcattgtgtttcaaaaagtttacatgatgtattggttttcgtaagtttgattattaactttcttacataaatgacaggtgtcccccagaaattccatataagcaatctaggaagttttggacctgggaaagctgtaagttttactaataatttctcccctctactcttcaaactttaaaacataaatttcaaataaggtaagatgaatttcagtccagagtttaatttctggattaaactatcacaaaactaacaatttaaaaataaaccaaccatttgtagaattttttaattttaaatattaaaattcctacagagatagtttcatttatatcataaacatttacttatgctatagtaataatttgactattgcttttgaatagaagagttttaggacagaattagtcaatgctacacctcttgataatagaatttcagtatagctttcatagtttttgtaactggcctttagaatttgggtatatcttctctaaaaagcttgacattaaatatattgatacttaaattatttgcaataataaaattattttataaggcaattaaattttcttaatttcttttgtaatacagctttactaaactactgtttagttttctcttaacattaattaaccaacctagatatctatgtagatagcttttacacagggaagagctagtaatttcagttatctgtaactgaaattttatgtaagaaatttgaaagtacaacacagatgcaaataaacttttgattgtgctatgggagccaagtagatgggcgggcttcatttcttatgatgcctatccgtagaaaaagatttagaaggacctacaaattctacaatggagaatagaattaagggaaggggaaaaggagagaatttttattttttgctttttactactatgtgatgttgattttttctaagaaatcatatctttttacagttgcaggacttatgaaaaagtagttgctttcaattttttgtttttgttagtaaacaaaaacagttctacagaagttgagagttacatttttgttacaaatgtttgtctaaataattgttttcctaggctttcaatttgatgcttgtttgtggtataatttagacaaaaagatcagtggatccctggctcctcagagttctacgttttccaatattgggaaatgactgctcatcataaaagctgccactcagtgagaccttactttgtgccaggcactgggttaagcactttacattcattaccacacttaattattatattaaccctaagaagtaagcatcactactactactattactgttactacagtagtctcctgatatccacaggtatcactttctactgttttagttacccagagccaaccacagttcagaaacattaagtggaaaattttagtaataaacaatttatgagttttaaattgcatgctgttctgagtagtatgctgaaatctcatgctgtcctgcttcattcctcctgggacgtgaatcctccctttgtccagtatatccatgctgtatacactacctgcccgttagtcatcgacatcatttgctcctgacatccagccatggacattattatggctcactgatccaggatcattccaagcagatgatcctcctcctggtgtacagtcagaagatcattagtagactaaggctatgtcacaaggcctgtgtaattcacctcacttcatcttaccacataggcattttatcatctcacatcatcacaacaagaaggataagtgtagtacaagaaaatattttgagagagagactacattcacagaactttacagtatatcattttaattgttgttgcttttaatctcttactgtgcctaatttataaattaaactttatcataggtatgtatgtataggaaaaacatagtatatagtttggtactacgtatgttttcaggcatccactgggagtcttggaacatatcctccacagttaaggggaaactactgtattaccgtatatacaggaagagtagggtggtggaaaaaccatctgattcatctgtagctcaatttatagcctctattcatggaattttgtaccttcgggaaaaactatatgatccttaatgtcaacttgatacccagaacccattgagttgtgtttattacttattatatgtatattgtaaaaatttgtgtctaccagcaaattagtgatgcaacccctaaatcttacagtagtgaaatcaatttgaggtatctttaggtttaattctgtttcaaccattgtaatggtcagttcctttgctttgctttcaattacacatggtccccacaattcctttgctttgctttcagttacagacagtccccgacttaggatggcttaatgattttttgactttccaatactgggaaagcagcacagattcagtggaaactgtattttgagtacctgtacaaccattctgtttttcatttttaagacaatatttaataggttacatgagatgtttgacactttatcatgaaatagtctttgtgtttgattattttgcccaactgtaggctaatgtaattgtgctgagcacatttaagggtagtctaggctgagctgtgatttcagtagattggacatattgtttgcattttcagcttaggatattttcagcttactatgtatgggtttgccatgatatgaccccattttaaatcaaggagcttctgtacagttcaaccttattttcaccatcttcatttagcaaatattttggattttaattatccctgtcctgtcctatagtttgttcagtgcccatgtgtacctacactcttgtttcctgacttaacattttcattgtcagacaatctttctttttctttttcttttttttttttttttttgagacagagtcttgctctgtcacccaggctggaagttcagtggcgctgtcttgactgactgattgtgttagttggtacttaatttgttcttgtattatcagttaaattttttcatttattgctgatcagagcagcagctcttaatagtttttaaatcatggactactttgaaaatctattagtaatagtggacacttccccccagaaaaatgaataaataccaaacagtttgtatgcaactttaggtgattcttggccttcccgtagctctcccaagaactccagggtaaacatctttcccctattatagtacaaggaaataagactacagttaataataaccacctgtagaaagtgggtattacacatacgatatgatgccaacatttttaaaataagaaaaacggaggcattaaaagaattattctaatgcaataactgctcaacattagtataatgttttccatagaccaaaagaaacattaattttaactaatattatgaaattgtatttggtctacagtaacttacccatacttagttaaatccctgtatacttaaaagtatgtgtgcctaggcatggaaaaataactcctggcgatgtagctcagtttgtcttttgacttgcagataatggcatccatttgaaatcgttacttttcccagaatatgcagtgtagttatttactaatttgccagtgatgttttatttatacaaagaaacttttttccagacaaactgaagtttcatgacattgtcacttcaaaactaatttatttatagttgtattttaggacctgagtcaaaggaccatccatatgattacttttcctgggatataataccctgtagtcatcaactgcagattcttgtgcagggttgccttttgagttattttgtgtgttgacctaatttcagggcctcaatttaatacattttctttggagaaatctataaagtatatgaaggggcaggtgagagatgggacagggacagaaatctgtcaggttgatagcatgcatatgctagacccctgacttcaggatctatgttttactaaggaattcttgcttccttttttgcaataaaaggttaaaatgtttgacaccaatgattcttaatagttggctagtaggaaaagtataagaaactagcaatcttgtagaaaggggcatttctagtttttaaaagtatactgaatgctatttcatatttataaagcaatattttattgtttatttgatgtataagatattaagacagtatgaaggaaatcttggcttgtgatgctacaaagaactatagtgttagtgattctcgaaggaaagtaaaactggttgatgtgtatacagatttttacatgtatttttttttaatccaagagattcatatacccccctttctattttatactgcttccttgagaataccactttagctgaaattcacctagaaaaaaaggtcttttgactcctatgaatatgtatcaaccaaaaatgaatttttcactttatgttcaatagtttacgtaatcaaaactttttggcggggaggaagatgatttgtttccaagtataaatttttatttagtaagaaaagaatgaagtccaaaacagtcttgaaaaagaataaagttggaggagccacttttttttttttttttttgagacagagtctcgctctgtcacccaggctggagtgcagtggtacaatcatggcttactgtagcctgcaccttcttggctcaagctgtcctcccaccttagcctcctgagtatctgggactacaggcacacaccaccatgcctggcaaatttttgtattctttgttatagataggttttcaccatgttgcccaggctgatctcaaactcctgggctcaagaagtgatccacctaccttggcctcccgaagtgctgggattacaggcatgatccaccacgcccagccacacttcttgttttcaaaacttactacacaactgcagtaatcaagacaatgtattactggcgtgaatgtagccatacagatcaattaagtagaatggagagtctagaaataaacctttatatttattgtcaattgatttttgacaaggattccaagataattcaatggggaaacaatagtctttttgacaaatggtgcttggacaactggatccatatgcaaaagaatgaagttggacccccacctcacaccatatacaaaaattatatagcttgtggagaaaagggaatccttgtacactgttgttaggaatgtaaattagtacaaccattatggaaaactatatggaggttcctcaaaaactgaaaataaaattacagtatgatccagcagttccacttctaggtaatctatcctgaagacttgaagtcagtatgtcaaagagatatctgtactctcaagttctgttcataaaagccaagatatggaaacaacgtaagtacctatcagtggatgaacggaaggaaaaatatggtatatatatatccactacagtggaatactacttagccttaagaaagaaggaaattctgtcgtttgtgacaacatgggtgaacctggaggacattatgctaagtagagtaagtcaggcatagaaagagaaatattgcatggtcttactaatatgtggattctgaaacgattgaattccagaaggagagagaagaatagtgtttaccagaaggtggagaggatgggaaatgttggtcaaagggtacaaaattatagttagacaggaggaacaaatgataagtatttaatgtaatcggtatgttaattagtctgattctgttattccacattgtatacccataatatcactgtttacctcaaaactatatacacttataattcgtcaattaattaaaaacaaatgaattcagaatgaatcaaagacctaaatgttagagccaaaacgataaaactcttagaaggaaacagatataaatctttgtgaacttcaattagtcaatattttcatacatgtaacacaaaaagcacacattataaaagaaaatagaagtaaattggactttgtcaaatttaaaaacttgtgctttagaagacagcatcaagaaacttaaaagacaattggagaaaatttttacaaattatgtctggtaagggatttgtatctacagtatgtaaggaattcttacaactcaataataaaaagaaagcccacttgaaaaatggacaaagaatcggcatagacacttctctaaagaagatacacaaatggccagtaagcatacaaaaagatgctcaacatcattattcatcaaggaaatgcaagtcagtaccataatgaatactattatcacactctccataatgactaaaataaaaagacagtaactaatgttggtgaggatatggggaaactggaaccttcatgcattgctggtgtggttgtaaaatgatgcaaaccttgaacaagtttggcacttcctcaaactattaaacattgagttatatgacccagcaattcagcttgtaggtatatatcctaataactgaaaacttacatccacacaaaacatgtacgcaaagtttatagcaatgttatatagccaaaaaaggaacaaataaaatttctagcaactgatgaatagataagaaaatgtcacacacgaaaggccacatattatataattccattctatttatattaaatgtccagaagagacagattgtggagacaaaaagattagtggttctggggagctgggggaaatgagaatgatggctcatggatacaggctttcattttgaggtaatgaacatgttctaaaattagacagcagtgatgattgcacacctctgtaaatgtagtaaaaatcactcagttgtataaggggtgggtttcatgatacatgaagtacagtaaagcttttttttttttttaaggcaaaagtgagcacatctatctgtaaaagaatgtctttgtcatttccactgcatcttaaggaaggcaataaaccctgactatagttttgcaaaggactctaaagggtttctcagagttgtaccatccaccccgattgccccctaaaagggaaggagagctgatcaacttgagttaaatgacaggcaagaaagagtgaatgaaatagagtataggcacacggggggaccctcctttagtagttcattctgtctagtttaaataaatactttacccaaattgtttacttgtgctcaaataatgtgacagcttgctgctctgaaaaatgatgaaaatcactgaagttcttaatggggctttaagactcatattgctgcagctatacctttttgctctttgccttttggaaattagaaggaaaccctgagagagaaatattgcaccccaagaaaatggttgcttataccaacttgtaatcatatagtataggggagaggtataaactgggtaaaatctgcattattgagcttattactttagctacctacaactagtagatttaaaaagtaaaacctgctgggtgcggtggttcatgcagtaaatcctagcactttgggaggctgagatgggtggatcacttgaggccaggagctcaagaccaacaggaggaagcttcatctctattaaaaatataaaaattagctgggtgtggtggagcacacctgtaatcccagctactcaggaggctgaggcacaagaatcacttgaacctgggaggtagaggttgcagtgagccaagattgcaccaccgcacaccaaccaggctgacagagcaagactctgtctcaaaaaataaatagtaaaatctgtaaattgtaggaaaatgccagaggagatgacatttcatatcagtcctctataagtgaaaatgatagtgattctattgtcattagactgatattttgaaacagaatacatgttttctatttagaaaaatttgtccttttgaggatatagcagccaatctaacacaacccaacactccaaattccatatgcagaaaataaatgaagatgtttaggtattcaaccatttatacaatgattatgttgtgttatataatttcatttttaaaacctttattgaattcattatctataagcctagccatacatccctttagtctttcaaggtgcataccacattaactacatgcgttaatttagtgaacagtttttactaggtgctgggcaagaacttagaggtttcttgccttcaggggcttcagagactgatggatgggaggagaggaactgagggcaatagggcaagcccagtattattccagatgtctgagcagaatacaaaggcagaagcatttcactcagagtagtgctgtctggaaagccttcttaggagagctaaccattgagctgaatattgaaacatgaaaaagtatttaccagatagggagcggaagggagtggataaatatttagtaaaactaggtttggtgtgtttctttatggttgtcgcttaaggttctgcctggtggggttgatagaatatgagtttaccaggaaggagaagactggagctgttgacagtggccagatcacattagcttgtaagcagttggaagcaattgcaggattttaagcggagtagcgacatttctaataggttttcttttacttcgctcttaaaggctacacatgcacctctattgctgaagtttggcgacctctggtgttgaactataaaataaacaacgttgtggaagaaatactagcgtttcagagcttgtcagttgctttttgtgaggtgcttcttgggccgtagtacttctttgaagacagtaattatcaactcataattcctgtgttgatatttttcagtgtttggataaatttctaactaggtagggccaggaacagataaattgattgatttaatagtaaggggatgaacaacatccccaaaggggtggggcaggctgatcttgatgctttttgcaacaaatgaaaagatcatgagttctagtaatagataactgagaatatgttcccttcccattggtgtgataatttttaaaattcccccctcttttgtatgaaatacacttacagaagagtgcataaagcatttccatctagtttaatttcctttaagtcaaaaaaggactcagttttcaggaaatccaggaataagtattaattactcaaaatatatgtctttagtctaaacgttttggaggaaaaaaaatttccatctcttaaaattcaagtgaaccctaagacttgttttgtgtatgaaatgataatttgtcaaacatcttttttatctataaaattattcaattattctgtttcaaaagttccaaatgtagaattcagctggagtaaatcaggtagaaatatactctgaacctaataaaaacttaatataaaacctaaagatatactcagaggttgaaataggatagttgttaaaatgtcttatgtttgtggtgttaaagatagtcatgcgttctgaatctttgctcttcatatctatcacttgcttaccttttagcctttaattatatcatccatctataatccagtccttattctcttttagaatgctgtttttcacctacacatctagtgtgcatagaatgtactttttactcatttgcctgctacattccttaagtaaaatcagctcttgactccccttccagaacctttcctgaatcccttcctctttccagtgcagtgtagcactttcacctcacacattacctatacttactttgctatactattgtcacctgattgttgttgatttacgtacaagtctctctgccctagagcttcttgaggaataggctctaagtaaacgttttgaaatgtgaataacttcagaggctgaaaagttttttaaatgcctcttgattatgtctcatctttgctttcttaaaaaatatgcatattgtatataaaatagttctgattttagggtttgacagattctgatacttttaatgctagccttataaatagcaatttaagaaggttaaacttctgtttgcatttagtaaaggcaacacaaattacataatggtcccttttttttttttttttactttttaaatcaagttaatagaaatataatttatatgtaataaaatataggcattttaaatgacagtttagtaaattccaacaaacatgcccatataaccactaccctggtcaagatttagaacatttctatcaccctaaaaatgtttctttttatagcctggaatgaccaaatgtctcagtttgcctggactgaggggtttgccaagatggtcccaggcaaactgggatggttggtcaccctgttcattctcctttgtggtcagtttcccatcttctgtctcaggtgatcattgatctattttctgtcactacagatgcctattctagaatttcataaacgaaatcatatatttcttttgtatctggctttttttgctcagtaccatgtttttgagattcgtcagtgttgctgcctgtatcacctgtttattcctttttatgctaagttgtattctgttttatgagtataccacaatttctttatccattcacctatgaatggacatttgacttgttttggggttttggttattatgagtaaagctcctatgaatgtttgtttacaggtgtttttgcagacatatgtttatatttctcttgaataaaaaagtagggctgaaattgctgatcatatggtaagtgtatggttaccaaactattttccaaagcagttttactattttacactcccaccaacaacacatcagaattccagtgcttcacattctcatcaacacatggtattctcaataattttagatttagtcttaaaatgacttttatcattaggaaatgcccctctttatttttgtttaattttcttatcctgaagtcttcattttctaatattaatataggcactctatctttcttatgattttgcatggtataacttcttgcattcttttacttttactctatgtgttttaatttaaagtgcatttcttacagacatatagttaggtgttttttaattgagtttgacaatttctgcctttgtaattgaagtacttagactatttacattcagtgtaattatcactgtggttgagtttaagttttgcaccttcgtatttgttttcctttcatcccatctttcctttgctctgtttttccccctcttttactgccacctatggattaaatcagtggtttttattttttctattggcttttaagctatacctccttgttgcatttttagaggttggtctaggatttaaaatatgcatcaatatattacagtcagtcttcaagtagtaatgtaccatgtcatatagaaaacaagaaccgtgtgacagtatttccattccccttcctgttctttgtgctatagttttcatactttttaattctacatgttataatccttacaatatttgttgtttatagggggaacccgcccctaatatttcaacataggttttttctattttccatgagtgtcggctggctgagaaataaagagaaagagtacaaagagaggaattttacagctcggcctccgggggtgacatcacatatcagtagaaccgtgatgcccacctgagctgcaaaaccagcaagttttattaaggatttcaaaaggggaggggatgcaagaacagggagtaggtcccaagatcacatgtttcatagggcaaaaggcagaacaaagatcacatgcttgtgaggaaacaggacaaaggacaaaaggcagaacttttgataagggtctatgttctgcagtgcacgtattgtcttgataaacatcttaacagaaagcagggtttgagagcagagaactggtctgacctcaaatttaccagggcgggatttttccccaccctgctaagcctgagggtactgcaggagaccagggcggatttcagtccttatctctatggcataagacagacactcccagagcagccgtttatagacctcccccaaggaatgcatttctttcccagagtattaatccttgctaggaaaagaatttagtgatatcttccctatttgcacatccatttataggctctctgcaagaagaaaaatatggctctattttgcccaaccctgcaggcagtcagaccttatggttgtcttccctagttccctgaaaattgctgttattctgttctttttcaaggtgcaccgatttcatattgttcaaacacacgtgctttacagtcaatttgtacagttaacacaatagtgggcctgaggtgacgtacatcctcagcttatgaagataacaggattaagagattaaagtaaaaaaaagacaggcataagaaattacagaactgttaatttggggaactgataaatgtccatattaaaatgaaatcttcacaatttatgttcagagattgaagtaaagacaggcttaagaaattataagagtattatttgggaactgataaatgtccatattaaaatgaaatcttcacaatttatgttcctctgccgtggctccagctggtccctgtgttcagggtccctgacttcccgcaacagttgttactttgctttaaacaatttcttcaagaggaattttttaatgagggggaaatatcatacatttaaccacatatttaccatttttggtgctctctattcctttgtgtagatcagaatgcccatttcagaagtctttctttaatcctgaactacttttttgtggtgaagatctgctggtgacaaacttggttagcttttgtttgcctaaaaatgtattttgaaggatattttcacttgatgcagaaattggtttcccttggtttccagggtttatttttccttcagtttttggagagatctctattttcttctggctttcattgtttctgttaagaagtcaactgttgataccctgtatataccctgtctataatgtgtttctggcattcttgaagattttcactttgtgagtggcttttatcagttgattatgagtttttatagtattctttgtatttgtcctcattaaggttcattgaacttcttgtgtttgtgggataatcatggtttttataaaatttgggtaagttttggtaatgtttcttcaaatagtttttctgcatctgccctacttcccaccccatacttcccaccatcagactcaagtcacatgtgtacatgttttttccctccatgcttcagctttgatagtttctattgctatttttttaattcagtgattgagtttcttccctgtgtctaacctgttaatcctctcctgtgaagttttaatttcacatactgtattttttaactgtacaatttccatttggttcttttttatatcttctatttctctccttgttataatagctattttaaagtccttatgtgccaattctgtcttctctgtcatttctggatctgtgtctgttgactgacttttgattttttctcttcttatattttcctacttctttaaaaatgttgaattttgtttgtcagccagtttcttagttgtttacacctggagggcagtttcagtgttcgttatttcatcacagctagatgcagaagtctataatggccttttaaaaaaataataataccatgcaagcctttgcatggcattctattaagtatatttcacaaagcattttaaaataagttttagattttttatactcaattttatcttgtttagccagttagatgactgtttcttcatagtattcttctgttgctaaagacctctgttattaacagtttaaaatatttttttccaacttttattttagattcaggggtacatgtgcaagtttgttacctgggtgtattgggtgatgctgaggtttgaggtatgaatgatcttttcacccaggtactgagcatagtacccagtggttagttttgcagccttctttcctgctctggttgtcctcagtttgtattattgccgtctttatgtccatgattacccagtgtttagctcccacttataagtgagaacatgcagtatttgcttttctattcttgcagtaatttgcttaagataatggcttccagcagcatctatgttgttgcaaaggacgtaattttttttatggctgcatggtattctatggtgtatatgtaccacattttctttatctagtccactgttgatgggcatctaggttgattccatgtctttgttattgtgaagaatgctgtggtgaacatgcaaatggttgtatctttttggtagaacaatttttcttttggatatatacccagtaatggcattgctgggtcaagcaagttatttgagaaatctctaaactgctttctacagtggctggactaatttacattcccaccaatagcatataagtgttcccttttctctgcagcctcaccagcatctgttgtttttttactttttaattagccattgtgactgatgtgagatgatatctcattgtggttttgacttgcatttctctgatgattagtgatgtgaagcatttttttcatgtttgttggccacttacatctcttctttagagaagtttctgttcacgtgttctgcccattttttaatggggttatttgttttttgcttgttgatttgttttaaatttcttatagattctggatatgagacctctgtcagttgtgtagtttgtgtctgttttctccaattctgtaagttgtctgtttattctgctgatagttgtttttgctatgcagaaactctttaattagttctcaccaatttttatttttattgcagttgcttttgaggacttagtcatagattatttctcaaggccaatggccagaatagtgtttcctaggttttcttgtagaatttttatagtttgaggtcttatatttaaatctttagtccatcttgagtcactttttgtatatggtgaaagataggggtccagtttcattctttagcatgtggttagccagttatcccagcaccatttattgaatagggaatcctttccccattgcttatttttgtcgactgtgacgaagatcagatggctgtgtgtggctttatttctgggttctctgttctgttccattggtctatgaatctgtttttgtgccaatatgatgctgttttgattaatgtagccttatagtacagtttgacgtcaggtaatgtgatgcctctggctttgtcctttttgcttaggattgctttggctatatgggctcttttttggttccatatgaattttagagtagtttcttctagttctgtggaaaatgacattggtagttcgataggaatagcatgaaaaatgacattggtagtttgataggaatagcattgaatctgtagaatgctttgggcagtatggccgttttaacagtactgattcttccaatccatgagcatggaatgcttttccatttgtgtcatctgtgatttctcttagcagtgttttgtagttctccctgtagagatctttcaccttctcagttagaggtattcctaggtattttattttattttattttattttattttattttattttatttgtggctattgtaaataggattgtgttgttgattgggctctcagcttgaacattattggtgtatagaaatgctacttattcatttgttgattttttatcctgaaactactgaaggcatttatcagttccaggaaccttttggcaggaacctttgtctttagggctttctaggtatagaatcatatcatctgcaaagaaaatagtttaactacttatttttctatttggatgccatttatttttttctcctgcctgattgctctggctagcacttctggtactatgttgaataggagtggtgagtgggcatccttgtcttgttccacttctcaaggagaatgcttccagtttttgcccattcggtataatgttgatgttcattttattaagttgaattaccatgataggggtagattttatttaaatcagggttttttttaagttgccaaaaagtctatttaacttttgaaacttgtttataacctcgtgatcttacaaaacctttatatattttatacaactcaaaaggattcatgtttcttttttatggtataatcactgtagtttaagaaaatgactttttaaatgttattttgtaaaaactcttccttgttttctgcccttaacattggatagaccattttagggagtcagtgacacatgcatttgtatccctatctaccactgacaaattgtaaccttgagacttctgtcagccttaggtttttcacatgtaaaagaggataatattgtatctgtaaaattcaaatgagaaaagaaaattgatgtgtctagcacactgctcttacatgctatgtgcttaataaatatttgttctttgttctctcctctctctctcactggcagtactttgaaaggaaaacttaattccactaaactcatgtcaggtgattatggtcggcttgctcttcccgtgacctcagcaagatcagaaaggaaaccttagtggccacctgcagtgaacaccttttgggctgtattttttgcctgggttcattgtgtcataagatacttctctgtcgtttaagtgttcgccttcctttgcccccatggtgtcactgtcttatgggacctcacccaactccttgtacttctaactcagccttctgtttcaatttctcttttttctgtatatttgtatgcccatctttagcactcttctttgtctgctttgcctgttatacactgtcacagccacctagcacttataccgcaggtactaccaaagcagttcttttagcctcaagctctcttctaagtaatatatctaatgttcaccacttggtggagatctccttctggttcttcctgaatgtctggtctcaaatattattttctcttctgatctactccttcatgcctaataccatcaagatttttcacaactactgaaattgtttaccttccagccacattcaataaccagattctttgatgccacctcctaaaatttgtttaccactgataagatttaaattactttctagctctgtttctagttatgacctctgaaaaggtactccttctgggtctgtttttctcatgtttaaaaatgtttgtactagatcaagggtcaacacagtagggtccaggggccaaacacagtcttctacccatttttgtaaataaacttttgtttgtggttgttttcatgttgcagagttgagtagtgacagagactttgtgtcccacaagccttaaatatttactgtctggccctttccagaaaacatttgctgacccctgaactagaaaatctctcatctagtttcctcttttttttaataatttttttggggaccattcatgatcacgtctaaggatagtaggcatttttaaattgctccctaatgttttgttttaattggtttatcattagaagtcaccaacagaaataagtgctttttttcctatattgtgaggaccttgtcataataaaatattcttcagtgtttcaaatttgagagctttttgaatttttagtattttttaatatgttgtaaatcccactgtcagccaccctaaggagaacctggtgttaagatttaaaatacagtaagaaaaagactagaaaaatgatagtagttgaattaaacgtggaacatactgtaatgttaggatctctgtttcccatgtaatagccttcgtgattcagtcatgtgatggtaaatggatgaataggattttctttgccattttgtgctgacagacctttttttagttaattgctttttaaaataatttatagtgaatacaccaacaattctatttacaggttggtagttaaagcctcttaacagtcactgataactatattttgaaggtaaagaatatagctagttaaaactctgaccactgattgtaaatataataaagaaacctttttttaaccagtggggaacccaggtgaaataaatgcaaatcaacagcaaaactgatggtaaaagtgtattaatctttataaaggaatgagttgcagaagaaaaaaaatactttttaaatatcatcactattcatcaaagcagattatttcccattgtggtaaagattttctacgtgcattttctggtatatattaaaggaggattcaaggtatgtaaaaaacatacttacataaaaagttgtaaatatcaaaccttaattatatgcatgctgatgtgtactgatacctgcaacttattttgaaatgcatcaaaaaataggtggattgatgtgtggatagagggttgtgtatgtgatgaaccaaatatagtaaaatgttagttggagaatatggatagtggatatagtgggttggtgttcactgtaaaactttcacaacttttttgtttgaaattttccttaacataatattaggtaaaatgtttagatctaagtggctgtgagacagtgaatttagggagaaggatgtgagagtgagtacacacacatggtataccttaaataaattattaaaagtttatatgttaagcataccgtgtatataagcatatgtttctcaactgttttattgtgtatttcacagatttgcttctattaggaatattcttaggttataagtaaaaaaaaaaaacaagaattgtaaaactttcatttcagggaacatcctgacttttacattatacattgtaactgtattagtccgttttcacactgctgataaagatataccccagactgcataatttaataaggaaagaggtttaattgacttacagttccacatgcctgggaaggcctcacaatcatggcagaaggcaaggaggagcaaagtcatatattacatggatggcggcagtcaagagacgagagcttgtcttgtgcagggaaactcccctttataaaaccatcagatcttgtgagacttattcactataatgagaacagcatgggacaaactactgccgtgattcagttatctcccactgggtccctcccatgacatgagggaaataggggagctacaattcaaaatgagatttgggtgggggcatagccaaaccatatcagtaactcttgaattatcccccataacctctatgaaagttagccgaatgcttaagaagagaagtccatgtgatttctgttcacacagtaaatggatacatttactaatggacatcacaagagttagtactgtgtcttatgttagcaaagtactgaatatgtagaggatggctgtacaacaaatactgattcaagagtgggcatttctgaagtgtcattttggttatttcgaaatatatcaaaatgaaaaagtatatgcaaatatattgttttaagtacaatagtaaatattcatgtaactacaactcatattaagaattagagctagaagaattacttttgccccatcccagtcacagcccccttttccacatcctctttgttaaactggataatctgtacttgattttaatgatgaatatacttatgttttttatttatttttacacagttttactatgtaaactatagtgttgtctgattttgaactttaaggcagtcatgttgtgtgcattcattgttgagtaaaagctcaccactgtgtgagattcatccataaaggtatgtgtagctctggtttagtcatcttcattgctagttagtatgctattgtatgactatgccacaatttatttgttaattctactgttggatttttgcttttatcggcagtattttattattatgaacaatgttgctttagaggtataagaatttctctgttagggtatatagcttgaaatagaaatcagtaagttgtagggtcactgaaggtatacacttataaacactcatttattcatgtcattgccgctgttgtttgttttcagctctcaaaagaatccaatagagttgcatgtgacggaattgttgataagcttattagtactactccctcattcttcactcctcaccctctcaccaggtacatgtatacacatacacatgcacatatccccagaacaatgttagaaataggggttagaataagtgttaataatttagattatttttacagtcacctttttattttctttccaataacattaggagtttgctcagaaattaccttatacacagttaaaggtcggtttatttttaactagattcctttttgatttatatcagtgaataattctgtagctcagaatatccttccatctatcttacccaaactttatgtattctaatagttaaataatttctgaaagtttttattacaggggtaattggcatacaagaaactacacatagggaccacatcaagataaaaagcttctgcacagcaaaggaaacagttaacagactgaagagacaattcacaaaatgggagaaaatatttgacaagagcttaataaccagaatatataagaagctccaacaactttataggaaaaatatctaataatctgattttgaaatggacaaaagatctgaatagacattattcaaaaggatacatacagatggcaaacaggtatatgagaggtgctcaacatcattgatcatcagagaaatgcaaatcaaaactacaatgagatatcatctcaccccagataaaatggcttttatctaaatgacaggcagtatcaaatgctgacaaggatgtggagaaaacagaatccttgttatgttgctggtggcgatgtaagttagtactgcttccatggagaacagtttggaggctcctaaaaaaactaaaaatagagctgcctaccatctagcaatcacactgctaggtatatacccaaaagaaaggaaatcagtatattgaacaggtatctgcactcctatgtttattgcagcactcttcacaatagccaagatttggaagcaacctaagtgttcatcagcatggacacttcatgaatggataaagaaaatgtgatatatatactcataaagaatgagatcctgttatatgcaacaacatagatggcaccggaagtcgttgtgttaagccagacacagacaaacttcgcatattctcagttatttgtgagagctaaaaattaaaacaattgaactcatggagatagggagtagaatgatggttagcagaggctgggaagggcagttgctggggaagtagggatggttaatgggtacaaaacaatagaaagaatgaataatatctagtatttcatagcacaacagggtgactatactcaataataatttaattaaatatcgaaaaatacctaaaagagtataattggattgtttataaaacaaaagataggctgtgcgcaatggctcacacctgtaatcccaacactttgggaggctgaagtgggtaaatcacgaggtcaggagatcaagaccatcctggctaccactgtgaaaccccatctctactaaaaaatagaaaaaattagccaggcgtggtggtgggcacctgtagtcccagctactcgggaggctgaggcaggagaatggtgtgagcccaggagccggagcttgcagtgagctgagatcacgccactgcactccagcctgggcaacagtgtgagactccgtctctaaataaataaatataaataaacaaaggacaaatgcttgaggtgatggataccacatttaccctgatgtgattattacacattgtatgcctatatcagagtgtctcatatattccacagatacatacacctactatgtagccacaaaaataaatattttttaaaactgcacatatttaaagtattcaacttgataagtttttccatacgcttacacccgtgaaaccaagataatgaacattcataatcccagtagtttcctagtgtccctttgtaatcttgcttctcaaaactatagatcttctgtcactatagatagaaaatttactagaattccatatgaatgtgattatactttaggtactctttttggtctggcttctctcactcagcttaattatttttagattcatccatgttgttctttttaaattactgagtaatgttttactgtatggctatgtaccatttatttacttgatgatgccattttggtttgtttctactgtttagcagttaaaaaaaatatgctatgcatatttgtatacaagtctttgtatgaacatgtgcattcatttctcttgggtatgtacctaggagtgagaatgatgggttgtatgatatgtatatgtttaacttttaagaaacttccaaactgttttccaaggtgctatataccatttcacatttccaccatcaatggtgagagcttcagttgctgtacatccttgccaagatttgttatacatagtctttaattttagccttcttattgggtatatggtggtatcttgttttaattagcatttccctaatgattaatgatgccaagcatcttttcttgtgcttatttgccatctctctgtcatccttggtgaagtgtctgtacatatcttttactgatttgtattggtttgtcttatttttgaattataagagttctttatatattgtaaatacaagccctttgcagaatatattttgcaaatatattctgcaaagttcgtgactagccttttcattttcttaagagtgtcttttaaagaacaaactttttaaaatttgaatgaagttctgaaagttttagcagtgtctagagaattagaaccaacaacaaaaacataacaaattctcactttgccctgaatggttacagaattatgcctgattattcactggttgccaccacaaatctagtacttaccattacattcttctacttctgtgcagttattcttgaactgtaactggtttaatattttatttcaataaatttgatttatacacggtcttataaagatgagtaatatgtggtatttctcttcaaagtcctcaatttttagcatttaatgtttcttcctgtcatccatcttgtacagccaggtccatgtactttcttttgttcagtacctagtatagctctagagacaatgaagtgctcaatacatttttgttgtgtactgtaattatacttttttgacatacaaatatgtaagtttatggtagcaggaaatctcttgttctttgtatcctccaaaggtcctaacatagttccttgtatacaagggacactattcaacgactgaatgaattgttgacggttttaaaataaactttgcctgatatatcgataatacaattggccctccatatctacaggttccgcatctgcagaatcaaccgactgcagatcaaaaatattcagaaaataacaatttaaaaatacattaatgaagaataatatacaacttaaaaacaatacaactatttatatagcatttatgttaagtattataataacctaaagatgatttaaagtataggaggatgtaaggttatatgcaactattatgccattttatataagggactcgaacatctcttgattttggtatcctcgggggctcctgaaacaatctgaataccaagggacagctgtataatctttggctatactgaactaagtgaagaaaaaatactctcagatgtgattattgcaatagatagtttttctagataaagatatctgatttttacttgaatatttttgagtatggtaatcttttttatgacccaaatttaacattattgttatcatagaagtctgtctatggtaatacagcatggaatctgtagtcagctacagataaaaggctttcacaaagtttgtttgcctttgtctgttttgtgctactataacagaataccaaagactggataatatataaacaatagaaatttacttggttcactgttctagagactggaaagtccaatgtcaaagggcccacatctggtgatggccttcgtgctgtatcatctcatattggaaggcagaaagtcaagacaaggcaagagtgagagggagccaaacttacatttctaaccagcctgctcttgaaataacaatcctgcttccactttaatgacatgagtccattcacaagggcagagccattacctaattaccatttaaacatcccacctctcaacactgttgaattgggtattaagtttccaacacatgagctttgggggacatattcaaatcatggcactgctctatttaatgagttacgtattttatttaacttgggaattccttttttcagtgaatccaatgcctgaaaacatggagactaaatttgtaaatatataggaaaagatggcaataacttgctttctttctaggtcctgggaactccaacaagggagcaaatcagagaaatgaacccaaactacacagaatttaaattccctcaaattaaggcacatccttggactaaggtgagttagatttttttttaagtatattaatcagtagttaactaaaacaggtttctcattgttcttaaactattttgagatcagatagttgcatgaatacaagcagttctgcatgtaaagatagttgtatagatgtacttgagtgtttcattgactttatatagtttcatcctcattgatttcctgtagatagtttctagcctggttttttatttgcaaggtaagggcagtgtacttatatcattaaagtacagaatttgatttaggagtaggatcttatataaaattttgacaacctaaaattcagaagtttatttacatagaggtgtatagtttaatatcatatagcatatcatacatttcaaacattttctttattcttttaaactgttaaaacatatatcttattatagatggcattttgtgtttttcctctcttgtttactttcctactggcattttggaaacaagattagaaagcaaatgtaatcttgctgggagtatacattaaaaacaattgatatgttaactggatgtcactagcctttggaaaaacccaaccttaacattagatagaaccagttctaaacagcatagttgctaatgtaccagggaacttttttttttcctttggtatttaattggaatgattttaaaagagattttattaaaaagtgttttcaccttagtttgatttgtgagattaagtatgaacagaaaaaaaatagaatttctcagtagggtttataagtagagtgaatctctagcttcttcattttacaagttcagaaactctgaccaaagattcaaagtgacttacccaagattacatggatggcttgtgacaaagccgggattaaacttctgtgtgtgtgtgtgtgtgtgtgtgtgtgtgtgtgtgtgtgtgtgtgtgtcacgggttaccaatgatcgactttataatacgtattttaaggagagacttactgtattttaaaatgtacatataacaattcattttatatacaattaaattcatttagttatagatcttttataattcgaggtgaagtcatttagggctataggtgaaataatttaccctctgtagaatcaaagtatgtttctttctctctctctctcttaatcagatatattatgattccagttactttttcttcaagttcttataatctcattatctatcttcagaaaattctcgttactaattatttatttcctatttagaatcaaagacctcaatagtattttagtgccagaattataggttgtaacttttactacaacctggccaacagaccacgatcttgcctcccttttttaaaagtttatggtaagcactaagtagtctgagattcaaaagtgttctttgatctttgtattcaaggcttattttaaatctgggtcagaagatatttagggactctcacctggctctaaacccagaagatctcaggtggcctacttggatttagaggctgcattacagtttgagtccattatagttattgcaagttaaattgtttatagtaagtgatttgtagtatactatgacttcagccatgttaagagaaaaacaacaaagagaattctgtgtattaaataaatacagggaaatattccaaaatgccaacagtagtttgggtaagaagaaagtgcatgattttattttctttgttctaccttttcaaactttcatattttctttaataataatgttatttttatgaggaaagggaaaaattctttttttggtgtaatctaagtattcatcacatattatcctccttatagagtttctgacaaatataaagctgaaattgagtccatgagatcctatttaacagtccccatcctccattattattattattattttatcaagactgccactagtcctcctttatctaaggtttcagttacatttggtcagcctctgtctgaaatcggtgatgtagtacaataagatattttaagagagatactacattcacattattttattatagatattattctaattattctattttattattagttattgttgttaacctcttactgtgcctaatttatgaagtaagcttttatcactgtatgtatagagaaaaacagtatatgtagggtttagtactacttgcagtctcagcatccacatgagggtcttggggacatatcccctgtagataaaagggaggggacactgtatttagtgtgtgtcaaattctgcattttccccctgaattatatctctctaacgcaagtattagctagagtagaatgtgaggaatggttgattataattaaaatgcagctaatgaaagagctgtactaaatatgtatgctgtaaatcttcctttgccctcttcaattcttgatgtttttatatcttatactaatgcttttcaaacttgaatcgtctatgtaaagcacatttatttaggtttccattcctgtaccatgtgtagaataatgactcagttctcccatcttttttgtctattaaaaggactgtgaacctttcattcgtctggtgttttttgacataatttggttttcacttcatacacatgcattatgtaataagtgcacttatgttggttcctcatttgtgcatactagagtgggtgttactgggattgtaaacaaaaaagtaaattcagatgcagaaattttattgtttttctctgtcatctagatgattgagaatatgcttgtgttggtttttttaaataggttattataagaattaaaatgcaaaacttaaaattcctagagggaactcagactcctttccctaccactgtgatagtggacagcaacttgagaaatgctcttagggtaagcagccaattgagtcatttaaaaaccatatagaatgtcctccaaagagaagaccattttgcccttggagggcaggtaaacaggagtctggaaacaggaaccactttacctttgttgctgtcttctgttagtcctatctcctgaagctgtggacatgtgaaccctggtttcctgtgctgcagtgttgtgcagctatatccccaagattgggacctggtgttctaaaaaaaaaaaaagtagacagaaataaagaccaaaagagaaaatgtcttttgtggaaacattgaggtaaggggatacaggtgtgtaaaagaaatagcagaaaaataacactgagatgatcccagtgtggtgtatggcagaaatcttgagaattaaaaactccaataagttgccctgggctattacataaatagcaatagccagtgcaacataattcattaataaagcacttgtggctttagtaggaaaggaaataggtgctaatattctgaaacaaggattattattggaggtgaggggatgaagacctatgccttggtgtacgctgtacactgcaaagaagaaaaacacatggaaagaaaaggaagtgatgcaatagtagattgagaattaagcagagacagagattggttggaagaagagaagaaatttaaattctgcatttagtatgtgcaggtgtggttaaatgatgggctattatatacagagtgagaatctagtttaaacactgctcctaatgtttatgcctcagcttttttcttttgtaagatagcgattatctgctgtgtcttttctcaggattattttgaaaatacagccataatatacatataaaggattactttagttttgaataaatgtgaaggatgtagcactccaatggagttttctgatttgtcttctctgtctccactgccctgaccttagtttaggccaccatcatatcatagaattattaaaaacaacctcctacctcctgatttccatcctttggtttcacatcattttaatccatcctcctcatttctgtcaaagttggcttttttaaaaagcacatgtgatgctgtcactcctatttaaaattcttctctgattcctcatagcctttaggaaaatttagcgttaaatacatataatgacaagggtgatcttatgtgccagtttttgcttgtccagtgtaattattaattgcttgcctcttcactctcaggaaggtcccaatttgggtggcagattatttagtcactctgttcttgatcttttctgcctttcttttccagaaaaatagagtatttagtatttgtcctattcccaaccttcttgaggtatctagttcttgaacccaggctctttcccaagttttacagcttcctgtatccttaaatgcatgttgttaggcaatgaatttgaaagtttagtgtctagttagggttgattagggatttttaataaggttatatcatagtaggtgtatgaggtgccttcccgcccactttcgagtgcctgatcctgctaccttgtttaaatttctttatgacaagcatttctcctctatcctagtaataaacaatcctgtgaggtcagttaggtaacacagatgtctgttttattctttcagagtaacaaaagaataaagtaataactggttagtagaaggaagtagattacaatcctaaggcctgctgatctcttaacagttacattagtgctatttaatatgttggctacgtattggagtgttgtccagtttgtagctcactttgaagggaccatgcagccatgctggattttctggtttagtcagattgtctcctagttgttccccagagaagccacattcatttctgcctcttgctagtgtctcccttccctctctctactcccccttccactgtcttagaatgttctttttttcttctctgcttaccaactcttaacctttcttaagttctcaaatctcacttctcccatgaaatattttctcattgtctaagttctttatgattatcctaccacataactcctatagtacctaccaaattataccatatatattatagcaattcctcattgcttttttataataatagtattaatatgaatgccaattacttcaaaatatttgttgccaagttgttggcatatatggtagtttaatacttaatagtaaagtgtctgtagcttttgtatgaccataggtcatttggtaagtctcccagaaagcattattcacaaaaattaatccttgcatacttgatttcctaaaacactgtcaatatgcttcatagtgaatcaatactagtgtttctaactggctaacagagtaagcagaaaattgaattctcaggtcatttcagctttcaaaggaattatttttgactgaaaaagttacttattctctatgcttacagctgaaccaaaaagccccactgtacttatttctttttaagactttgtccataatgctacagtttttcccctgagccattcaatagaattttcagaacttggtaaacctacctgttttaaccgttgttcaatgtattattaaaatgccttcagagaggcctagagggcacaaaacaaaaattgctgccaaagttttctttcacatccattctatctaccttttctggtctctctgcattactcatttcattcacatgtattccagaaagcataaaaccatgttggggatttctattggctcctaagcttgccacttgtctgttttgttctattgcttatggtaaatcaatttttatattattattcaacccccctctgccctgaacattctacctagaccattctcacttgcctcacaaatacatatagtatgttctctactgaaagttctacccacatccttattattgctataataatcacttcctctccctttctaaagccactttcctatgttagtagacctcacttttttatttctactggctatatatttttatttgtttgctggaaacccacattaaaatccagcttttagggtggctaatccaaatgtgaaaggaataatgtgaaaaaggaagaatactaagtaagacataattttcagattgcttgtgggaggcaaaggatgaggttggggtggatttgaaaagaagacaaaattctatttttaatttatcatttattctttaaatcttgtatcttctatgtaaccagtgctgtgctgggtaccataaagcatgcaaaagaagtaaaatatatagtctttgtccttgaaaagctgacagttgaaaagcttagttgaagcaagtattgaataatgtgagatactatgtaaccgtatacttaattctgtgctgtaagtgttcagaggtgttccacatggctgtaggtgttacaaggcagacttccagtgaggatggtggagggaaaaaggaacccccacttagggataatacatgaggtgggatgttgaaggggaggtttaagatttgcctaggtgtagaaaaggttaggaattgttatagcctgggtgaatatctctcaaggtggagagagctgaatgaaaagaaaatatttctatattcataggagagccaacctgactgtaataattgttttgtgaacaatgaaagattaaattggataagcggacatttggcaaatcccactcctgtgtaggcatgtagtactatttcatcagcacatgatgtgagggagagaaattatgttacatagttaaatgctgatatctacatatatacagccagtcatttaacatcgttagtaggtgcttagaaactgcaactttaagtgaagttatgcacaataggtcctcaaataatgttggttcattcagcgttgatgagggaaaacatttggttttattatacgtttcactaaaagtcacagttttcaagaacctatcaatgacattaaatgaagatttactgtataacttttcttacctatagtagaacttgggaaaactcgataaggcttttaattagtacagctgaaattcactggatgttagatttgtcatggctaaggaaaggattctttgtgtttcttatgctcaaccttctttacctgaactggtatcttaacgaaaaggcttagaaaattatgcagtagacttgagctgaattcagtttgtgtatcctaccctgttagatgccaacttcatagatagcaattttacttgggaggaggactctgaaagttgttttcagtagcctctggtaatcatttttgatagtacttaaagtgaattggattaccttgtatgtcagtgcatcattagatcaatgtagcaaagcatgtgaaagactgccaaagaatatatgtttttttttttttttttttttttgagatggaatcttgatctgttgcccaggctggagtgcagtggcacgacctcggctcactgcagcctccacctcccgggttcaagcaattctcctgcctcagcctcccgagtagctgggattacaggcacccaccactacacctggctaatttttgtatttttagtaaagatagggagaatattttaaaaaatagtatagactaatttgttaagtaattattgaattatgtgctacatatgagcacttaagtagacttgatttctttcttagttaacataattacctattcaacaatccatggcattgtctcacttttaatcctatgtttaggtttacaaattgcatataatttcagatgattaatagattacttgagagtcaatattggagttgctctttaggagtattcatggtttattagtttttaaaactggatgcttatattttgtatatgaccaggatataggatgagtgttgtacatttatagtaataaaaactaatgaggaatagctatttggaacagacatggctcttgttctgtgttctgttagattaattatcactgccaacagccatttaaaatggacatttttacattgctctgattggctacataatacaatagagttgctaagagctgatgctgtgagatccatgttaaccataggtcttagtatggtgtatgtgattgtttaaaaatggcctttttaaagtgcttgagattcagtcacaacacttagctccaggttgaaatttgaaggacaaagtctattctaggacatgtagggcagaaattgcctctgtcattttttagttacccaaatgcaaatttattttgaataattcttcatttaaggacttctttgcatttgttcaatactgcagaaactttctttttgaaaaaatgatttttttctgttagtttcttctatgggctagtatttgtgatgggagttgatatttgtttcaatttaagaaaatgagttgctgcataggtgaggtagtatttgaatcactttaaaagttcatgtcagtgttttggttcttttcagtatttcctttctcttttctttcttttttccttcctctttttcttttctttcttcttcttcttattttttgctttgttttattttgttctgttttatttatttacttttggttttgtttttaaaggggtgttttgggatctctgtggccttgctgcatacttcgctggccatatttagtctgcgtactaattgttagttggcccagttgagtcttattttgtgctctcagttctttcagtctggttttctatttttgtccacctggttgtgttttagttcatgagagaatttattctgatgggccagattttaatctgtgtactaaattttagtctgcagactaaaagtaatccgcggattatttatttttgaaaaatatttaattcccccactggaaactatcctaaaagaatgttaaattctcttagaatagccaggggagttcacagatactggtgagttctgccattttttgttctcaatacctagacataatagaccctgctacctcccttgcatatttggctccgttgtgcctaggtgttggtatacattactatgcctgtcacctgtaactgtgactgtcccttagttgtattgttaattttatatattttgtttagcttttggtgggtgaattgggcatatttgcagatggaactgtgtttaatttgtagtgctggaagatgtaggatttattttttcagagagtttttccaaagaggaaaaaatgttctctatttatttttcctaagtaccgggtgcaagggtatgagcgggcaaagcccacaatagaaaaagtaagttaatacccgcactcctgaggtgatatgtcaatttcctgatgagtcctaagataatgagaatgtcagcaaagaaacatcttttagcagagaagtcaatccaaaatggagaataatccgcggtggcctgatccttcttagctcacacaaattgaaagtatctggcttgaaatctatagtaatataacttaaatatatttattactttcctctcatcactaataacttagcaaaaaaatgtttatactgtgtaactggaacacattaatagagaaaaaagtagcatattgggaacttgaaactttaaaagcaggctaatatgccccctcccagccatgtctgtggatgatgaatccaggtcatagaagaccattttactttgggaactttacttctagatttcattttgattttaactttttttggttttgtatttttttaataaacgcactggcattggaacataataaactaaaattaaaatgtttctttactgtgcctcaccattgcacaatcaaaaaaaatttttttgcatacactgtggtgaaataatttttaaaacttggacttgctactgtgaagactgatgtttaaagtttataactgtataaacattttctatgtccccccccacaccatggatttcttataacattggatatatttttccttgctggactattctcttttggattgacttcccctgtttggattatttcactgcattatcatctttaggattcgtcaggaacaggacatttcacctcaggagtgcgggtatgtacttaatttttttttcccaaaatttcagggcaggtctataaaacttgggggaaatcttctttgagaggctaaataattactcattcttgaaatgtaatagtaaacaatgtaagtagctgtgatttctgtttttattcactgtatggcataggtttcacttatagtatatttagattgtcagcctcttgggtgattcattgacatctaggctgaagtttaggaattgtggggttttaaaattattatttctattacaagaataaatattgatgaagatccatgaaaccaaaggtctgagtgttaagcaatttcagtgagtaaggaaagaagtgacagcggaagcttctttaattaaaagacaaatttcagttcttggtggtttccttttctttagaagcaaaaataattcagatgagctagtttctagtttgccctataatttttagaagttacatgctaactcaccctgtattatggtcagaaatctgaactgtgggagatactgggttttgaccccacgtaattttccacttaacctttattcacagagtactgaacctaggcttttctcatcaagaatctctcaagggtttaaaatgacagtgtatagtttttgtaaaggcaggttaaatcttgattttaatgtaggcttttgacatgtattattttcttcattgtttttaactcttgaactttatgagttaggattccctgacaaatatacgctaataaatgtcttagtaccgatatggatgatcacttgtaggcagtaaaacaccaaaagatatgggtgacttaaaaaattactggaaataggccgggcacggtggctcacgcctgtaatcccagcactttgggaggccgaggcgggcggatcatgaggtcaggagatggagaccatcctggctaacacggtgaaaccccatctctactaaaaatacaaaaaattagctgggtgtggtggcgggcgcctgtagtcccagctactcgggaggctgaggcaggagaatggcatgaacccgggaggcagagcttgcagtgagccaagatcgggccactgcattccagcctgggtgacaggaagactccatctcaaaaaaaaaaaaaaaaaaaaaaatatatatatatatatatatatatatatatatcggaaataagcttataatactggtttattaatagctttaacacaaaatctttgaaaataagaaatttttttatttaaaataactcagcatccagccatcctacatttgaatgttagtgggagatatttatttctacttttggtgctacttttaattccacttatgtgctgccatattggtgcaaaaacattttggattagctagcaaaataaatccatatactatcaaacagaagcaaacttgccttcagggataaaatatgccaatactgtttaatatttttacgaaaattttctgagttttcccactgattattttctttttacattctgtatatgattatggaccttgggagcaagagaggggaccagtaacagtggaagagctaaacatttcaaattcgacagtaactctaaggtttccttgactgaggcgagtcagagtattcaaaagaataaagataaggcaggttttgaccttacaaaaaggtttctttgtaacataaccaagaaattgactaaggcctttctttatgttccgaaataatttcctaagagcctactttacctaatttctcaattttcatggaaaatgtctttttcaataataaattaaaaacaaatacaatcctcttttcactgtagacagcactcataaataatctctggaaagtctaatgagctctgtagttgtaactagttctactaactgtcagcataagtgaacaaccaaatgttacatgagccattcttacgaggaaaccttagccttccaggctgctccatgccctgtcacaatctgcgtgggcttttctcacttgtgggtccgtttccctccatttataagtgtctacttctctgcccacctccatcgtcacaccttttatttcgttgtatgttcttcctgtcgagggatatatgtttcatttttctttaatttcaaaggcttctcgtctgtttatttctatccttacctttttatttttattctgtaggtggccataatttagaatgaagaatatttttatagtttttgtatttattagctttatttaagacacaaattagtagaaagctatctattcctttaagtagattaatttaattgaatttttcttcaatatagccttcagttgactttttctttgtcttaatcattcttaatgaataatacatttttttctccttgattaaaaccctggaatattcattcaagtgggggaaatctggccacattcatggtaacacctacttgagaaaaaaaatgcaggacattttatcaaattctaggtattcaagaatttcttcaaataatggtaggctctgtttattggaaataataccaaatcagtagcatttatagacctagagtaaatagctcttctttctcttctgtttgattgccaagttttcgaacagtgctgctcatcattaacaattgttcggctaaaaaaacaatgcaaaagaggcaatcttttatttactgccatagcagtgaaaactttaaaatttaaaaaatatttttctagttgtgcttgccaccagaactcagcctttcccatgtgcctgtcatattttgtatgcatgtctgattgttattactttatgattagcatatatagatttttctctgagcatttctcatataatctttaattagcaattcacccctgtgaatcatatgcatttaactctttccattctagaaggtcctttcccaaatgcaaccatgtttctgtacatggtgggaattaagtcattattcacagggtatttgcttagattcttaaaataaaacattaattgttctttccctttttttgtactgcaggtcttccgaccccgaactccaccggaggcaattgcactgtgtagccgtctgctggagtatacaccaactgcccgactaacaccactggaagcttgtgcacattcattttttgatgaattacgggacccaaatgtcaaactaccaaatgggcgagacacacctgcactcttcaacttcaccactcaaggtaactccaaacacttagcctcttcaccagttctaggaaagctacaccctgggtgtgaaatgacattctattaattaaaatctgtggaggacaaaaacggacatattaagtacttaggtaggtgaaaagagcatcctttctaacttactggccactacttacatggttttgaacagaagagtagcacgtaaaagttttccaatagacatagcttctttaatttttagcagaatataatgttggcacatgagaagttacagagagttcagtgagtgaagtttatcactaattggacaaatgtacaatttaacttttaggtttggatctgaaacaaaatagtagcatttcttgcttccaaagagtttgtatcaagtttttttaaacctggaatgaattggctatatttgtgtaaattcagttgtcttccaaacaggaggaaaagtagagccctataaaccctttctaagaacttaaacaatagacacaaggaaatttccatcccctctgagactggcaccattgctgctgctgagataatactgaaagggaaacgaactttgtgcattgtggtttctgggagaccttgggatagtcactatttcttcactatttctgtgttcagttttcttttctccttgattaagacctaagtgattcattcattcagtcacaccgcctctgctgatgtgactttcttattacactgagcataaaaagtgtacaattcattacaaaaaaaaaaaaaaaaaaacaagaaatagttgatatattgattagtaagcatactcaggctagaaaacaaaaaagggagatgtagagttttatgtgaccaagaaagaaatatatttcctttattcatatgtatcatatctttctttttttttttttttttttattatactctaagttttagggtacatgtgcacattgtgcaggttagttacatatgtatacatgtgccatactggtgtgctgcacccactaatgtgtcatctagcattaggtatatctcccaatgctatccctcccccctcccccgaccccaccacagtccccagagtgtgatattccccttcctgtgtccatgtgatctcattgttcaattcccacctatgagtgagaatatgcggtgtttggttttttgttcttgcgatagtttactgagaatgatggtttccaatttcatccatgtccctacaaaggatatgaactcatcattttttatggctgcatagtattccatggtgtatatgtgccacattttcttaatccagtctatcattgttggacatttgggttggttccaagtttcttttaaaaaaaaaaaaagaagacttttattttggtattttaaaatcttatgtttgcccagcacattagatataaatatgtgtgtcttgaacatttatgtttttgagggtttggagaatgcatttgtatttggatgtaatgtgtatagatacagtgtgtggtctctgtggttatcagagtgcttatgtgattctgtgagtatcagtgaaaaagtggaccctgtaaacacagtcatgtattgcttaatgatgcagatatgttctgagaaatgtattattaggcaattttcatccttgtgcagacgttacagagtgtgcttacgcatactaagtatattattgaaagtgctatcattttgaggtatggccccttgttaaaaagtgttcaaatgctctgtcttagcacccattctgaaactgggctgtgatcacaaagtagtactttctcacggtctttgtaaatcgctattgttactgtttttgaacagtgtttctatgcaataaagacacagatgtccagggaagaggtggggtttttttgttgttgttttttggtttttttgtttgtttgtttgtttgttttgttttttttttttttgagacggagtctcactctgtcactcaggctggagtgcagtggcatgataccggctcgctgcaacctccacctcccagattcaaacaattcttgtgcctcagcctccttagtagctgggattacaggctcctgccaccatacctggctaatttttgtattttcagtagagacggggtttcgccatgttggccaggctggttttaaactcctgacctcaggtgatctgcctgccttggcctcccaaagtgctgggattacaggcatgagccaccatgcctggccttgatgatgccattctatttgatatgatactctgtattctaattttggagcagtgtttccaaatggtgatcttgttttctaaggaagctgtaactgtgtacagatgcagctttaaagcacatactagttagtatgtggatgactagttagttaatggatgaccagaataaaactgggtaatccaaggggttgaagaaggagaatcaattttccacttggttgtatagctaaaggaaatctagagatagaaacattgtgggtctggtgaagggtgaggggtattagtgaggttcttctaaaggcagcataaagccctcctccatcctcataacaaattgtcagtgacatctgcagcactacttcccccaaataaaataaagtacatatagtaggtgctcagtgaatgtttgagtgccgtgtaccactttaagtaaacataatattcattaattcatacaaccagtatttattgggcatttctaatgttccctctggttgttattactattgttgttttaattagtaaagtaaacctgctatatgtacagaactataaagattaaacacttgagtaaaatatagtgttttattaaggtaaagcttacaataaagctaactgcattttgatgtttgttactgtaccatgaggtaattagccataaacagtaattagtattactttcatgtaatcacagtatttccatattcagatagaggaaggagagagatgaacagatatgagatggacaactttaagatctttctgattgcctaaatccataactcaggagaatatcagacctctcatttttccagcactgaagcttcagtgttccaggaccccatgactgacaatattatctgcattcagatgttggaaattggaataaacctttggcacacccccttctttctatttcttcctgtcattagaatttcaaattcagccatagctgaatcagaccttaggaaacaggtagaatcaggaaagcccaataaggatcagtattttcttatgaactaatttgttgcctattccaagactggaatatattagggaatcaattgttttgtatgtttaaaggtgagtctccccctaactctatcacacacatccccaatctcagttttttacctaatttgtatgaaattttaccaattgaagttatttagtaaacattgtcctcctgagagtgtagggtaggatgggggtggtaaagatattatccatttactttagtatgagctaatgtgaacattctattcctctaccacttggctagattatgtgagaatggtagctttgtagggagataagtaagagtggcagcatgttggctaggccagaagaagcagtgatttagtaactctggggaactgtttaattgagagttgaaacaggatatttggggcagccagtgagcaatatgcagactcagacagactgaatattttggggcggggggtaagagtatctggacacgagaaaagcaggtgatgagatagaaaaggtgttccagaaagcaagtaaagaaaagaacagtaaaaggaagattgagatataaaaaacaaaggaaaataaggaaagggttagaaaatattttttgaaagagtataagaatgtgttacagaataggaattgatgaaaacatggaattgaaaatgagtaggagatgggcaacaaaagcaagtgttctagaatccaagctcatcaaaagtttgtatttctttcatttgaaagcagtaggctacttatttataaaatctattgtaattaattatgataactagcagattccatatttgtaacaatgatttttaaacttattttcctgttataaaataacaatagacataaataaggtcagtgcatctatttatctgcccatgtgctaggcattttcttctaagttgccttatcctcagacacatctgaagtgaatatagtattacaactacctgagattaattaaagtatggacatacattgttttattgagcttcactttattgcatttcacaggtaatgcttttttttttttttatatacacaaataaaacgttcgtgtcaactctgtgttgactaagcctgtttttccaacaggctatgcttactttggtgccatttttccaacagcttatgtttattttgtgtctctgtgccacatttggtaattcttgcaatatttagagctttttcattgttattacatccattatggtgatctgtgatcagtaatttttttgatgttactattgtgattgttttggaagtttgtattgaactaattgatcaatgtgtgtgtcccaactgctccaccaatcagccaatccccatctctctccctcttcttggatcttcctattccctgagacacaacaatattgaaattaggccatttaataaccctacaagagcctctaagtgttcaagtgaaaggcagagtcacacatactctccctttaaatcaaaagttagaatgattgagcttagtgaggaaagtgtgtcaacagctgagataggccaaaagctaggcccattgtgctaaacagtttgccaagttgtgaatgcaaagaaaaagttgtcaaaggaaatttaaagtgctactccagtgaacacacaaagaagtaaatagagatcaaaacagccacagtattttcttaaggcaaagcctaatccagagcaaggccctaatgtcactcagttctgtaagggctgagagaggtgaggaagctacaaggaaaagtttgtagctagcagaggttggttcatgaggcttaaggaaggaagccatttccataccattcaagtgcaaggtgaagcagcaagtgctgatatagaagctgcagcaaattatccagaagacctctagctaagatcattggtgaacatagctacactaaccaacagattttcagtggagacagaacagccttctattggaagaagatgccatctagaatcttcttagctagagaggagaagtcgatggcctggcttcaaagcttcaaaggataggttgactcatttgttatgggctaagacagctggtgattttaagtggatgccagtgctgctttaccgttccaaaaatcctagggcccttaagaattatgctaagtctactcttcttgtgctctataaatggaacaaaaaagtctgcatgacagcacatctgtttacagcgtggtttactgaatatttgaagcccactgttgagacctactgctcaggaaaaaaagattctttcaaaatgttactgcttaatgacaatgtatctagtcatccaagagctctgatggagaggtacaaggagatgaatgttgttttcatgcctactgacacagcatccatttctgcagcccatggatcaaggaatgatttctacttttatgtcctgttatttaagaaatgcatttcataaggctgtaactgccattacatagtgattcctttgatggatctgggaaaagtaaactgaaaaccttctggaaaggattcaccattctagatgtcattcggaacatttgtgatttgtgaaagaggtccaaatatcaacattaacaagattttggaagaagttaatcccaagcctcatggataactctgaggggctcaagacttcagtggaggaagtcactgcagatgtggtgaaaatagtaagagaactagaattaaaagtgaaacctgaaaagtgactgatttgctgcagtctttatgataaaacatgaatgaatgaggagttacttcttatggatgagcaaaaaaagtggtttcttgagaaggaatctgcttctggtgaagctgctatgttgagatgacaacagaggatttagaatattccataatcttagttgaaagcggtgacagggtttgagagggttgactccaattttgaaagaaattctaccagggtaaaatgctatcaaacagccttaaatgctacagagaaatcttttgtgaaaggaagagtcaggcattgtgacaaacttcatggttgttttgttttaagaaattgccatagccaccctaaccttcagcaaccaatatcctggtcaatcagcagccatcgacataaaggtataagaccctccacccacaaaagatgactcgcagaaggctcaggtgatctttaggattttttagtgataaagtatttttaaattaaggtatatatgtggttttttttagatgtaatgcttattgcccacttaatagacgatagtgtagggtaaactcatcacttacatgcagtggaaaaccaaaacatttgcgtgactcactttattgtagtggtctaaaactgaatctgtagtatctccgaggtattcctgtatcttctaaggttattctcaaattactatgaactctgaggtgagtcataatggtttttagacttattatttacaatagccatgataaatttacataggataggaactcttgatgtgtgtaggacacatcaatagaattgatgtcagaattattcttcagtactttctaagtaatctagaagagtaaaatttctatgtaatcaggtatactcttctgggcaatgaaatgctaggtaggccagtggagacacaccacagggagaacttgagaaaatttatgagtggactaaaagggggcaggtaagatttagttcaggtaactacagcagtaatgacaaataatgagtgactgtattcaagattttaggctctaaattatctattttatataagaatttttattgttttgcctgagattatttggtccaccctgctactttggatgtactctactggggaaaatgtagagtggtgtaggaacaaacaatcaaacactagtatcttgaatgaaagttctgtgtgtagtttggacagatatacttacagaagaccagaacactggtggtatatgatatataaccaagacagtaaagaaatgcaacattgcaggagcaaagagtaagtcagacctaaagcctagttccctttaactacacaggtgtagaccttggtcaacacactatccctacctgagtttccccatataaataaatgagattgttggattaaaggatattcaaggacatatgcatcttcaaaattttaattataaaaatgaattgactccagaaagataaagaaaaaatgacaaagctaaaaatgtagaccacaataggattgagatacaaaatcatgatataaataaacatagaaaaatgtagactggttctcccagaatcaaaatattagcagtattattatactttaagttctagggtacatgtgcacaacgtgcaggtttgttacatgtgtatacatgtgccatgttggtgtgttgcacccattaactcgtcatttacattaggtatttctcctactgctacccctccccctccccccaccgcacgacaggccccggtgtgtgatgttccccaccctgtgtccaagtgttctcattggtcaattcccatctgtgagtgagaacatgcagtgtttggttttctgtccttgcgatagtttgctcagaatgatagtttccagcttcatccatgtccctacagaggacatgaactcatccttttttatggctgcatagtattccatcgtgtatatgtgccacattttcttaatccagtctatcattgatggacatttgggttggttccaagtcttcgctattgtgaatagtgccgcaataaacttacatgtgcatgtgtctttatagcagcatgatttgtaatcctttgggtatacacccagtaatgggatggctgggtcaaatggtatttctagttctagatccttgaggaatcgccacactgtcttccacaatggttgaactagtttacagtcccaccaacagtgtaaaagtgttcctatttttccacatcctctccagcacctgttgtttcctgactttttaatgatcaccattctaactggtgtgagatggtatctccttgtggttttgatttgcatttctctggtggccagtgatgatgagcattttttcatgtgtctgttggctgcataaatgtcttccttatgactactggatacataacaaaatgaaggcagaaataaagatgttctttgaaaccaatgagaacaaagacacaacataccagaatctctgggacacatttaaagcagcatatagaggaaaatttatagcactaaatgcccacaagagaaagaaggaaagatctaaaattgacaccctaacatcacaattaaaagaactagagaagcaagagcaaacacgttcaaaagatagcagaaggcaagaaataactaaggtcagagcagaactgaaggagatagagacgcaaaaaacccttcaaaaagtcagtgaatccaggagctggttttttgaaaagatcaacaaaattgatagaccgccagcaaggctaataaagaagaaaagagagaagaatcgaatagacgcaataaaaaatgataaagggggtatcaccaccgatcccacagaaatacaaactgccatcagagaatactatgaacacttctacgcaaataaactagaaaatctagaagaaatggataaattcctggaaacatacaccctcccaagactaaaccaggaagaagttgaatccctgaatagaccaataacaggctctgaagttgaggcaataattaatagcctcccaaccaaaaaaagtccaggaccagacagattcacagccaaaatctaccagaggtacacagaggagctggtaccattccttctgaaactattccagtcaatagaaaaagagggaattctccctaactcattttatgaggccagcatcatcctgataccaaagcctggcagagacacaacaaaaaaagagaattttagaccaatatccctgatgaatatggatgcaaaaatcttcaataaaatactggcaaactgaatccagtagcacatcaaaaagcttatccaccacaatcaggtgggcttcatccctgggatgcaaagctggttcatcatacgcaaatcaataaacataatccatcatataaacaaaaccaaagacaaaaaccacgtgattatctcaatagatgcagaaaaagcctttgacaaaattcaacagaccttcatgctaaaaactctcaataaactaggtattgatgggacgtatctgaaattaataacatgtttatgacaaacccacagccaatatcatactgaatgggcaaaaactggaagcattcctctttgaaaactggcacaagacaggggttccctttctcaccagtcctattcaacatagcgttggaagttctggccagggtaatcaggcaggagaaagaaataaaggaaaagaattaggaaaacagggggtcaaaatgtccctgtttgcagatgagatgattgtatatttagtaaaccccatcgtctcagcccaaaatctccttaagctgataagcaatttcagcaaagtctcaggatacaaaatcaatgtcaaaaatcacaagcattcttatacaccaataacagacaaacagagagccaaatgatgagtgaactcccattcacaattgcttcaaagagaataaaatacctgggaatccaacttacaagggacgtgaaggacctcgtcaaggagaactacaaaccactgctcaacgaaataaaagaggacacaaacaaatgaaagaacattccatgctcatggataggaggaatcaatgtcgtgaaaatggccctactgcccaaggtaatttatagattcagtgccatcctcatcaagctaccaatgactttcttcacagaaatggaaagaactactttaaagttcatatggaaccaaaaaagagcccgtatagccaagacaatcttaagcaaaaagaacaaagctggaggcagcacgacttgacttcgaactatactacaaggctacagtaaccaaaacagcatggtactggtaccaaaacagagatatagaccaatggaacagaacagagccctcagaaataatatcacaatctacaaccatctgatctttgacaaacctgacaaaaacaagaaatggggaaaggattccctatgtgataaatggtgccgggaaaactggctagccatatgtagaaagctgaagctggatcccttccttacacctgatacaaaaattaattcaagatggattaaagacttaaatgttagaccgaaaaccatgaaaaccctagaaggaaacctaggcaataccattcaggacataggcatgggcaaggacttcatgactaaaacaccaaaagcaatggcaacaaaagccaaaatagacaaatgggatctaattaagctaaagagcttctgcacaggaaaagaagctaccatcagagtgaacaggcaacctacagaatgggagaaaatttttgcaatctacccatctgacaaagggctaatatccagaatctacaaagaacttaaacaaatttacaagaaaaaatcaaccccatcaaaaagtgggtgaagagcagtattatttttaaatgcccaataagtttattttttaaattggatttgaaaaacttggtaatgcctcatttattgcatttcattaagaatagagttctgggctgggtgcagtggcttacacttctaatcccagaactttgggaggcgggggtgagcagatcacatgaggtaaagagttcgagaccagcctggccaacatggcgaaaacccgtctctactaaaaatacaaaaattagccaggcgtggtggtgggtgcctgtaatcccactactcaggaggctgaggcaggagaatcgcctgaacccaggaggcagaggtcacggtgagctgagatcacaccactgcactccagcctaggcagcagagcgagactctgtctttaaaaaaaaaaaaatagagttctgaatataagattttcaagtacatcactagaactttaaaaatattaacactttgctagataacttctaaaaacacctgtactataatgtagttcaataaaagcattcagacattttttggtgagtggtataaattggaaggatcccaaagtcatcatggctttcagcaaatatcatattatatagtcctcacatgaaacatcaccagtattaccaaaacagtatcagtaagccttgtaatttgcttactatttgtctgattttctaattagtttagcattaggaacatggtcaggaatttcctgggcactttggaattgttaccaaggagagaagcagttatgatgtggtttattcattcatctacaaggaaatatatacaagtaagtaagcaccattagaattcagaaatgtgtgagagcaagggacatcatcttagcatttgaattattgcctaaaaaaatacacaaatgtaatgggggcactccattattaagtcatttaaacctttttgtgaatagagagaaatagcacttttaactgtatagacaaccactgacaattattatatgtaataagaggcctggtacacacatgaggaggtcagacttcttgtagaagaaaaagaatgtctgcttattttagtaactcctttttggagatctgcagggtgagctccttcaaagctagtagaggaggaagattcccttttatataatgactgctaagtattttattacatcactgtaagaggagatctagtcagtagaggggttgattttcttccctctgattcacacattgattgctgctctcaaatttgtcctcatctttcacacaacagtttgtacaaacacgttaccactagcacctacctgccccctcagaaaactaggaaagttcttacctgtcccattttatcaatgaatttggggatcttgtacttggaagaatagaaacttttaaggcaaatttcagattttaccaactagatgtaggtttcatttttccattggaaaagactgctttatcaggcatatttgagtttattgagtttgtcttttcatgggaatttttcttctgtgttttgcagtataaaacaatgcagcaaaatttagttaaatggattttgttaactttttggttgattcatatctatatttaaactcattttgcttttgtttaaattgtgcattaaaatgtttaattatggaacacataattattgatgcaccatcaaaacatttgtagttttccctaataaactacgtggctttttaatgaatagttttcatgacttcttcagttggctgaagaaatttttatcacattaatttttctaaagttttctggaatttcttgccgttttgttttaaaccatgtctctaggtaacacagtctatcttttatccttcctatttttcattttcctctcacttctccagagctgtcccacttcattatggacctttttgttcttatccccctactctcaagcttagcacacatatctagtaaataaatattaccttacatttcaatttcagtctcttcaacactcctctgccttcaagaatacatacactgtgtctgatgctaacaggtgctgttactttgctgtttctatcctccaaaataccaccattttttctattctttcactgcagtttatattcaccctcactgactccatttccttatcactcattgccatgggtagacaaagtgattagaagtaggtagtaatggttgggattaaaaaaaaacattttgaactggttgacatagccctatagaaatgcccatagtctgtccccataaaaagtgtggacttacagtggcaagaataggactatagcaagagtgcaaggaggcttcctcacagggaaaagttgtaagtaacagttaacaacctctttgaagtagagaagactgaacagatgaaagcaatggattttaaggattgcctgtaattaaggaagagaagaagaacaatggggtgtagaagttggaaggatgtagaagtagtagtgattgttcattttagaattcttaacttttaggttcttgctagaaaaaggttcacaaagtaccccccttcacatcttggaccccaccctcacccgcactccgtgtctttgggtgtggcaaagcctccgagatcccaaatcttttctatttcttgtcttcttaatttcttcactttttttccccttacccttcattagttacccctctctccttatctaaggccaaaatgacagtctttttacatacatacatacatacatacatctatagatttacattacatacatctatagatttacatctataaaactatttacatagtatttacattgtattcggtattataagtaatctagagatgatttaaagtatatgagaggctcatgcacgagaatcgcgtgaacccaggaggcagaggttgcagtgagccaagatcacatcattgtactccagcctgggcaacagagtgagactgtctcaaaaaataaaataaaaaataaaaaaataaagtatatgagaggctctgtgtaggttacctgtaaatactatgccattttatgcaagggacttaagcatctttggatttgggtatctgaggagggtcttggaacaaatcccccaggataccaagggatagctgactatacattacatattcttgtccagactaagacacaaaactgctgtggccttcaactggcattcagatacacagaaggataggtgatgtggtaaaagagagtaaatatatgggagaaaatggacagcatgggccataaggagagggaccacagaccactgatactcagtttattttaaagattatttttaacagctttgtcaaaatgtcttattaaaaactccggtcctcttttcatttttaggtttattttaggtatcgagcacatggttattgagatgttttcatttgacagtgcccctgtcctaagtggttgcctttcttgccagattgttttttcagttgttcttgtcaatttctgttgatcagacaaaggacagttgtctttttatctccctatcctgggaccttacacatttcatgttcaatattgttggatggatatgtgggtgggttgatggatggttggattttaaagaagcctttctattttagatgcttttaattgagaatggtaaatctgaatttctttagaataaaaaccacatattaatgcttttttttgtacctggagccataaagttttcagccatcacaattgctagcaattattttgctttcctgcatataagattatgggttaaaattgaactgacttgaagtaaaatggcataggagctttctgttccttagtgagaacccagatagctaccaagtctgattgtgagaaaacagtatctcctagaacctgataattagggcagtatcttcaactgtcttcccaggcaagactatttgatgagctggactaaattttctcatttaggggaaaggaaaatgaatagttttctcagttttaagcttttcctttcattcatttttaataaatcttagcatcaatttattgcttttctttaccacaatctgatatcatttagtatgtaatttagtacaaaatttagatgtttaggtactgatttgaataaatattattggcaggggctttgcaccagaaaacattttaaaactactacattaaaagtacaatttcccttgctagggtcttaggggaagggattaatgtagagtgactgcttgcgagtttggtgtttccctttggggtgatgaaaatgttttggaactagaggagatggttataaaccttgcgaatgtactagatgctgaattgtgctgaattgtacacttttaaatggtttatgttaacataaattataccttaatttaaaaaaaaaagcttttcttgaactttttaaaattcatgctgtatctgtgaattgccaaagtgtgtgctgtagctcagaggataatgtcctcctgtagcttgttatggttatgattgttccttcaaactgtgacacatattagagtgaaaattagtacttacaggctaaatacttaagtaacaagcataaaccagggttatcccaggtaactgggagaacagtcacattacctaaaactaacaaaaaatgcttttgtgtacaagctcgctaccactacttgctacagaacttgattcttcaaagaagtaagtacagttgacagagacagcttcccccatgcagataaaaagcctatttcaaacttgtaaaaagtaacaaaaataatcttactgagtaaagaattggataaagacattttcagttttaataaaagcagtgacactttaaacagatgtttctcaaatcctttttccactagtgtctagataagtcttatctgccattggctcataaacagttggataggttggtcagtacatccagttgtacatacatacacatacagacacacattctcattcatattctctttgctatgacaccaccaccttttaaaaacataaagaatatgtttgtacagtatttcctgtagtcaaatattgacatagtaggacaggaaaacctaatatatttaaatcaatgaaagatgcagatatgtcttattaatatacctactccaaaactttggccacatctttccccgagatatttttagttctcagacataattttagtagataatgcctttgttatatatcacagtacttctgtgggctttttctgtaagttgattactaactcagttagctagtttgagatataggtttgtcatgtgggtttttttttcccctgttaaactggtagggtttgttttgttttgttttgtttttgagacggagtttcgctcttgtcgcccaggctgaagtgcaatggcacggtcttggctcactgcaacctctgccttgcgggttcaagcaattctcctgcctcagcctcccaagtacctgggatcacaggtgtgtgccaccacgccaggctaatttttgtatttttttttaaacttattctttttttatgattattattatactttaagttctgggatacatgtggagaaggtgcaggtttgttacataggtatacatgtgccatagtggtttgctgcacccatcaatccatcatctacattaggtatttctcctaatgctatccctcccccttcccccctaccccgcaacaggccctggtatgtgatgttcccctccctgtgcccatatgttctcattgttcaactcccacttacgagtgagaacatgccatgtttggttttctgttcctgtgttagtttgctgagaatgatggtttccagcttcatccatgtccctgcaaaagacatgaactcattctttttttatggctgcataatattctgtgatgtatatgggccacattttctttatccagtctatcattggtgggcatttgggttggttccaagtctttgctattgtgaatagtactgcaataaatatatgtatgcatgtgtctttatagtagaatgatttataatcctttgggtatatacccagtaatgggatggctgggtcaaatggtatttcaaattctagatccttgaggaattgccacactatcttccacaattgaactaatttacactcccaccaacagtgtaaaagcattcttgtttctccacatcctctccagcatctgttgtttcttgactttttaatgatcaccattctaactagtgtgagatggtatctcattgtggttttgatttgcatttctctaataatcagcgatgatgagctttttttcatatgtttgttggccacataaatatcttcttttgaaaaatgtctgttcatatctttcgcccactttttgatgggattgtttgtttttttcttgtaaatttgtttaagttccttgtagattctggatattagccctttgtcagatggatggcaaaaatttttcttattctgtaggttgcctgttctgatgatagtttcttttgctgtgcagaagctctttagtttaatttgaccatttgtcaattttggcttttgttgccattgcttttggtgttttagtcatgaattctttgcccatgcctatatcctgaatgatattgcctaggtttccttctagggtttttatggttttaggtcttacgtttaagtctctaatccatcttgagttaatttttgtataaggtataaggaaggggtccagtttcagtcttctgcatatgcctagctagttttcccaacaccatttattaaatagggaatcctttccccattgcttgtttttgataggtttgtcaaagatcagatggttgtagatgtgtggtggtatttctgagggctctgttctgttccattggtctgtatatcttttttggtaccagtaccatgctgttttggtgactgtagccttgtagcctttgctgatgccgccagctttgttctttttgcttaggattgtcttggctatacgggctcttttttggttccatatgaaatttaaagtagttttttctaattctttgaagaaagtcagtggtagttcgatgggaatagcattgaataatctataaattactttgggcagtatggccattttcaccatattaattcttcctatccattagcatgtaatgtttttccatttgtttgtgtcctctcttatttccttgagcagtggtttgtagtcctccttgaagagatccttcacatcccttgtaacttgtattcccaggtattttattctttttgtagcaattgtgaatgggagtttgctcatgatttggctctctgtctgttattggtgtataagaatgtttgtgatttttgagattgattttgtatcctgcgactttgctgaagttgcttatcagcttaaggagattttgggctgaggcgatggggttttctaaatatacagtcatgtcatctgcaaacagataatttgacttcctcttttcctatttgaataccctttatttctttctcttgcctgattgccctggccagaacttccaatactatgttgaataggagtggtgagagagggcacccttgttttgtgctggttttcaaagcgaatgcttccagcttttgcctgaaacgttcagtaccgtattggctgtgggtttgtcataaatagctcttactattttgagatatgttccatcaatacctagtttattgagtgtttttagcatgaagggctgttgaattttattaaaggccttcgccacatctattgagataatcatgtggtttttgtcattagttctgtttatgtgatgaattacgtttattgatttgcatatgttgaaccagcctttcatcccagggatgaagccgacttgatcatggtggatacgctttttaaggtgctgctagattcggtttgccagtattttattgaggatttttgcatctatgttcatcagatatattggcctgaaattttctttctttcttgtgtctctgccaggttttgctatcaggatgatgctggctgcataaaatgagttagggaggattccctctttttctgttgattggaatagtttcagaaggaatggtaccagctcctctttgtacctctggtagaattcaattgtgaatccatctggtcttgggctttttttgttggtaggctattaattactgccattggtctattcagagattcaacttcttcttggtttagtcttgggagggtgtatgtgtccaggaatttatccatttcttctagattttctagtttatttgcgtagagctgtttatagtattctctgatggtagtttgtatttctgtgggatcagtggtgatctcccctttatcattttttattgtgtctatttgattcttctctctttcctttattaatctggctagcagtctatctattttgttaatcttttcaaaaaaccagctcctggattcattgattttttttttttaagagttttttgtgtctctgtctccttctgttctgctctgatcttagttatttcttgtcttgtgctagcttttgaatgtgtttgctcttgcttctctggttcttttaattgtgatgttagggtgtcaattttacatctttcctgctttctcctgtgggcatttatttagtgctataaatttccctttaaacactgctttagctgtgtcccagagattctggtatgttgtgtctttgttctcattggtttcgaagaacttatttatttctgccttaatttcgttatttacccagtagtcattcaggagcaggttgtttagtttccatgtagttgtgcggttttgagtgagtttcttaatcctgagttgtaatttgattcactgtagtctgagagactgtttgttatgatttctgttctttggcatttgctgaggactgttttacttccaattatgtggtcgattttagagtaagtgcagtgtggtgctgagaagaatgtatgttctgttgatttggggtggagagttctgtagatgtctatctacagaacttggtccagagctgagttcaagtcccaaatatccttgttacttttctgtttcgttgatctgtgtaatactgacaatgtggtgttaaagtctcccactgttattgtgtgggagtccaagtctctttgtaggtctctaagaacttcctttatgaatccggatgctcctgtattgggtgcatatatatttatgatagttagctcttcttgttgcattgatcccctaatttttgtatttttagtagagacggggtttcaccatgttggccaggctgatctcgaactcctgacctcaggtgattcacccaccttggcctcccaaagtgctaggattacaggcgtgagccactgcgcccggcataaactggtagtttaatgcagaatcttattttcactcttaccaataaaatagttttgcatacaaagttaagagtggactctaacatttgtgtcttaaccttctatagaactgtcaagtaatccacctctggctaccatccttattcctcctcatgctcggattcaagcagctgcttcaacccccacaaatgccacagcagcgtcaggtaagaacgttctaagtctcttctataaaaacatattctgggctgggcatgatggctcacacctgtaatcccagcactttgggaggccgaggtgggtggatcacctgaggtcaggagtttgagaccagcctgaccaacaaggtgaaaccttgtctctactaaaaataaaaacttagccaggtgtggtggcaggtgcctgtaatcccagcttctggggaggctgagacaggagaattgcttgaaaccgggaggcggaggttgcattgagccgagattgcgccactgcactccagcctgggcaacagagcaagactccatctcaaaaaaaaaaaattctgtttttcaaaaagatatgattacctttcatttcatttgatgagtatgaacatttaatatcttttatatatcaaaaacagcacagccaaatgagtaaacctgaataaaattttttgctttatttccaaaaagcataaaacaaaagcacccacccaggtaccttatatataagatataaatatcttctgataatgttaaattctgtcatcttagtgagaggatcactcgaggccaggagttcaagatcatcctggacaacatagtgagaccccatgtaaaaaataaaaataaacttaaaaaatctttgaagttacggtttttacataatttcaataggaaatcaaatcaaatgagatgtttatagctgaaaacatataaatatgttgttactgaaaataatacacttttgtttttttcccctcgaatgtaaattgcagtagtatactagagaggcaaatattttcaagaagtataaattataagtttatacttatatttaatcatttttttaatcatttgaaagggctaaaactgcaatgcaaatatgtttaactgagatttagatcagaatgtgacaagactcttatataccaaaaaaaaattattcacgggttagagctagggtgtgctgcagggcctgaagccagctaatggtggggcctgatttagtgagaaccggtgtccttgcaaatattctgaaaatatccaacccttaagagtgaagtgaaattcttccaaataatgactggatgcttttaaaacttaaaagttttaagttagaaacataataggtagcacagttaagggctcagaatttggcaccttttttttctctctctctccaaaaagctaatggcaggagctgacttcattttctttaaatagtcttgaactgagttggatcagatccatttttgcctaagggtatttatgctgcaggagataaaatctttcattactagttcttatcattaaacagtaaggtcaaaatccatgtcttgttgtttgatggtgttgtttctgtctaatcttaaaacttttaaaatgttgctaataaagatttaaaacatttcattctagttcatgttcaggaaaagtctggaaagaaagatctcttttcttgttccaagtttatcagcacatgctaccttgagaaagtaatttgaactttattagtttaattagtgtcttattcattttcccagtctgtaaaatggagtggcaattactttaggacaacatttgtctttacttgtctttatttgtctgtactttaggacagcattgccactccattttacagattgagaaagtgtgctgaaatctgctttaaaatttttaaggtaaaaagattttttaaaagtatgacctgtttagaatcaagacagaattgctataagccattaacaaatttaatactggcccaggttacgttaattgttcacaacatgaaaaaggccctaactctgaactaacacatttacttactgagctcatttctacagttttactagaatggctttacactgtgtataaaaatgagtaggttttgagcagtttaaagtaactttcttaatgcaagatagcgaactaattaatgattgtgacttatgtttttgagcaaattgtctgcttagtaggagcctagtataacctgattttcatgttgttttgatacaggttacagcaaactgaaaaataataataatttacatgtgtatatttttacagctatagaaatcagatttcaacataaaaatagaaactgacattgaactttgactctgagagtttactccaaagttgaattggggtatagttaatagaggaatagtaagctgaggtcagagctaaaattagtttagagaaatgcatgccttgagtaccttaatagttaccgaagaggatatttcagatattggtctgagctaaagtaaataaagaagtgttataattctgttaaaatttcccattgttcattagattgaaagcacactggtggcttagaaaaaacggtgtttctggccctgctgtttaagaaatatttctcctttagggcctcagatttggtactgaaagagatacagtaaatgaacttaacatcatcattctaacaaaaaatgtgagtttcaaatagatacttttttttaaagttccccttattgtaacccaaaaacagtttaaccacagtatagttaaacagttttctatggcgctgcagtagtgaaggcccaagtatgtcaccaaacatacttcaggaaatgctggtctagaccaagtgattgattgcttggccttccggctgcctgtagtttaagattcatgtatgttttaaataagaatttgtcattgtgagttacattcttttgtaagaccttaaaatatatatgtcctcggccaggcgcggtggctcacacctgtaatcccagcactttgggaggctgagacaggcagatcacctgaggttgggagttcaagacgagcctgaccaacgtggagataccctgtctctactaaaaatacaaaattagccggacgtggtgatgcatgcctgtaatcccagctactcaggaggttaaggcaagagaattgcttgaacctgggaggcggaggttgcaatgagccgagattgtgccattgcactccagcctgggcaacaagagcaaaactttgtctcaaaaaaaaaaaaaaaaattctcggcatcagacatgttttttttaaaaagccatgtggagggcaggattgacatccatcctcttatgacaaaagaacctatgacttttctttcctggataaatggacatgcatctctccacacagacagagtgagggactgctaagctacagacatagccgaagctttcctcacaaagcatttcaggatctgctccagagtacaaaataaataaataaactattaaactataaagctctagaccttgaatatctgaacctggaaatatttcaaatttaaattttcaaagaatttctaatcacccatctaagctacatcaccacagtaatatacccccacataccctggggcgaattaattataatatgaacccctaagtaactaaactagttgtcatacttgatttaaatcagtgtaatggagcacataacatcaaaatgattcgtatcttagaggtggagccacttttagtttatgacagtcatatcaacaagaagcaaaataatacttaaataatacttaacctgttttcagtagcctgagaatgtgcctccaaatcatctaaaaatgaccttacatcactaaaatacaaattcaaaagactaccataactgaattatcatctgatctgttaaaataccattcctgttgttgctcagcatcattgcaattcaggtactgtcaagtatatttgtgtctagagcaagatcatcagaataccgaggctcctagataaactgcttgggacactttttatgtttatagctggcttaaacaagaatggagttttctgacatttgtgtagacctgggaacaaagctcaatcctaaagtatgtggaataaaagcagaaaaacaaagcatattgacaaagatgccatcaaccattatcatactgactatattatggtgaaataagctttggattttagtcagttactgttgttagccaaagctgttaaatggctttcagatatttaagtcttattaaattttaaatacattataggcagaaatctaattctctatattgctgcttctgaaaaagcaaaagaaaatagacattttcatacccagattgtggcctaaaatcatactgtgctaattctgggaatatgtaattgttctctgtcatcaccaacaaactttgactagtacaacaaaatatcacaattctttctcacctttgaaaatggtaaagatggtgcaaatattaagtttgaggacattaacactgagggaactgcttttgcagatgtttcaactttccttttgttgtgttctgcaactgtatgtgagctgataaaaacttgtgggaaagcattatagtataaaacaagagctgtcagaattcagaatttttagttcagtaattccactttagggattttaacttcaggataaatctattggaaagaaaaaggctatcatatacagagaggggaatcacataatatatataatcataaatcatataataaaacagtatgtattaatatataacaaaaaggagagccaatgtaacctgaatggtcaacagtaggaaattgttttaatacattgtggaatctccatttttatgtagccataaaaaacaattttcatgaagcttgtggacattcatggaaatactcatcctaatttatgtagagaaaattttaaaatctcatgaaccttgttggttactattgtcaaaatgtgtattttcatgtggatagggactagacagaaatatacaaaactgtaaactgttgtgctaaattagtgggtatggatgttgatttttttcctaaaaaacattctttataagttgtttttaaaatgctttagtatctagagacattattgttaatcatggctctgattgacatgagaatctcttgaaaattacccatactactatcaattcctaaagtataatttctttgtttctttttttgagacagagtcttactgttgcccagactggagtacagtgtgtgatctcagctcatgtaacctccaactcctgggttcaagtgattctcatgcctcagccttccaagtagctcggattacaggcgcgcactaccataccctgctaattttttgcaattttagtacagacggggtttcactttgttggccaggctggtctcgaactcctggcctcaagtgatctgcctgccttggcctcccaaagtgctgggattacaggtgtgagccactgtggccagccaaaattcatagtataatttcttatgtcgactgaaatatatatatatatatatatatatatatgtgaatggtcaacgtaggaaatgttcaacatttatatatataaaatatatatttatatataaaatataaatatatattatatatgtcttattttctttgtacacccagtcatctcattcactccatttaggagaccattcatctggaacatctaaagtaataaatctcaagacattatcattttcctaatcaaatacaaaccattttagagagcatctgctcagatgagttgaatgtgagatgttgtagggaatttcaactagagcagttttctggttttatctgtttggtatattggtcatcagcataaagtttctttcaatgcaatggttctgctgttaaaaaccatggatttcagttcacctttcattatctaccgagaagtggtcatctatcccatggttatgtatattcagtaatagacattattgcaagaatgagcacatttttatctttgcatcactctattagaaaagtttggccaggtgtggtggctcacgcctgtagtcccagcactttgggaggccgaggcgggtggatcacgaggtcaagagatcgagaccatcctggccaacatggtgaaaccccgtctctactaaatatacaaaaaaaaaaaaaaaaattagccgggcgtagtagcgggtgcctatagtcccagctattcgggaggctgaggcaggagaatggcgtgaacccgggaggcggagcttgcagtaagccgagatcacgccactgcactccagcatgggcaacagagcaagactgctctcaaaaaaagaaagaaaagtttatccttttttcaccctgaaatttatttctgtatgccttcttccagtcagtgattctactatgaaattataacagaaccatccagatccttccatgtaaaagtccttcaaatgttaatgatagctaacttgccctccatactaatgacagctttaaatcctaatcctggatttgttctaaagtattagggtattggattttctacccaattgtatgtcatctgtacatttcacaaacatgtcagttttttacctccatccaagcaactaataaaacatatcaaagaggacaaggcagagcctactagaaatgttttgcctttattcaagttactgataaattcattggaactgggctgggtttcctagagattactcttctggtggtctcttagtgattggtcattcctcttcgtgactggtcattcctcttgtttgcttaactacagaccaacctttaaaatgcccatttataggaggaggttataaaaagcactttgtaaaatgcttcattgttttaagaaaactttcagcctttttccattaaaaaaaaagtaaccatatcaaagatggaaatcaaaccgttgtttttaagacggggaaatttctagtgcctaaatatctgtaagctgtgagtttctgtaatccgttttagatttgtttcttggactatagattgtgagtttaaagacatttaaaatttttgattgccctcaccttccttggggcacattttatttattaggatttttattatatcttttcaagttgaaaacccttctaacagaagggggagtcatgataacatttggatgaggtctgtcattttacgtggtctgcaggcttaacttgtcttcatcttggtttgaaaagctcttactgttactttatttgcattgagattatttgcaattacttgatcaaaattttgtttatgcttttctatttcttgttagttattagcctcctttgaagactttagccacaaaatcatacctatttgttcttcaaacttctaaaaattcatttggctatagtctcgttcagattttgctatggctagtggcccctttgtcttacaattacaattattttcaccccagaattcctgttacctacataccagccaattctttttagttgggcagaattaaacacagaataatttctctcattgtttgtttctactgtttttgagaggtgaaatgttaagcaaattgtcagtttattagatgcttgcttttctaaaatgacagttaccctccctcatcctttccccaggtactactaatattattcctggtctttgggccagttttacagtgtacattgggaaagctgtgttcatattctgtctagtgtagaagctgcagtgcatgccctgttgttcctctttgtaaacttgttcttcctgttttctctttatcttaacccaaatagattttaaatttcataaaagtctgcaactttttaaaaaaaaacaaaaaagcaggcatttttgtctatcaagaacatatagtgtatagttattttaggaagtaaaaattgcctctattctactttcaaagataatcacacataacattatgttttagtctatatatgaatgggcagagagacatgttttttaaaaaatgggcttaggctatttagagggtgaaggtatagactgtagtattcaaccaatatcctaaggctataccatagttaatttcttattcttggacttttggtttgtgtcgaagatggggttttttgtttttgttgttctgaaaaatgctttgaagatatctttgcataaagctgtacttattcttctaaatttttagaagtagagtcaaaaagtataaagaattttaaagtttaatgtcaaattgctttctgaaagtttgtcccgctgtcagttcatactccccactgtcagtacaagtacttttctatttccccattgccccatgtcctcatagagtgggagtaggggaagtacagtgtgcatgtgtgcacatacacatttttaggtgttaccaacttggtagccaattaatatgtgcatcttttttaggtacagtgttgcatccatttcctcctgttggctctgcatttgaaatacagacttccattttgaactataccattttgacaaattcactgacaccaatgagattgtatctaccccatgttagggtttcaggttcactttgtgagtttgtatatagatacctaaaatcaaaccagcttagtcattattctcaccagagcagtcctagacatcacttctagaagttcttgctttctgtgcaaaacatgttctctcctatcaagtcaaaaattttatctcggtttttcccctcctctaaaagtaatttaaaatctggattaagttggaattccctatcagacatttttccgtgtgtccctgaagtgttcctcagttccttgcctgaagtcacctacttttatttatatgtccttttttttctttattcctaaattaagcattttaacttaaaggaacagtgaaaatgttacctgtgtgtccccatgaccttcagttttctaccctgaacagccaaacttcttaaatacaatgtgccctttccctgagctcacagggaactgagacctctcagctgccagcagatcaaatataaacagtcttattgacaggtcttccaggtatcctggtggatggggttggctcacaggcatccgaattttactgctatttttataatcactgaaggctaccttagtgttctgtgccacatcttttccttgcaggtgtactttgatttcatgagtgtaaattataatttcaaattaaatataagtttagggtatactttgattctctgtgagtaattatcttgtttgttaatgtgccagttaataacattaatatctaagacatagttttacagtagaagcatttccacttggaacagcttgagtaggaacatcctgagttaggtacacagtataaataatatctcccaggctgttaattttatcttctagagagattgacctgtcataagacatttctaactattatagaaagaggatacctgataagtagaaacacgtaaaatgtgcttggaagagattgttattgggcaagagcgtagtaaaggaaatacgggaataaaaatatacctggcggggtgcagtgactcacacctacaatcccagcactttgggaggtggaggcggtcagattacttgaagccaggagttcgagaccagcctggccaacatggcgaaaccccatctctactaaaaatacaaaaaaaaatttagccaggcatggtggtgcgtgcctgtttaatcccagctactcgggaagccaggagaatcccttgaacccaggaagcagaggttgcagtgagctgagattgcgccactgcactccagcctaggtgacagagtgagaccctgtctaaaaaaaaaaaaaaaaaaaaaaaacaacctaatgtttccaagtgtacttataaagtgcatgtaaaacacaaaaaggctcatttgatttgtctaaaatatgttattttactaatatgccaacaatataaatagtaaaatgtttaataattttgtagctgagaacttgaaatgtgttgagagcaaataaggaactgaattttaatctttaacgtcaattactttaaataaatagccttatgtagttagcagctactatattagagaatataaatagaacatttctgtggttgctgctgggccagatagtgagcatttcaataaatcagaagaatttaattttttatagacacacagatctagaatactaattcatggtggcagggcctttggaaccctgtctcctatgtttattttctgtcttctcctcccaacccatttccttgttttctactctctttttatttaaatcctttggcagtaggtgtaaatggagaccttccattcactctccttcctgttcctcatttgcacctttgatcaaccacatttgggacagggagtatggacaggaccatttgtgggcggggggtggggggatgcagacagcaaggaatcaaggcaagaaattctgcgtttatgacttgaacatttgggtggggcagtttcctcagtattgagacagttgaccattaatccatgactccattatctagccaactcttacagatctcttgagaatctgaaaaaaacaaacaaacaaaacaaaaaatgctgtagatcctgtcctataaaaagaaattatgataccagatatagaattttacatatgaaaatttactccaggacaaaaatcacagcctcatggactcttttgggaacctgatacttaagggttctacccttggtttcactgtgggactgcctaagttgtgttttacctcttatgtcacacagaataaaattggttttaatacatgtgccaatttgctttgcagcatctggtacaaagccatagagccatagacttttcagaaaacaattgattcctgagaaaacaattctggaaaaaagaattaaatctaatataatccttttttgtcttgtacagtttcttagaagcacacctaattgtgtagggagattttgtcagcgattccctcattggcttgtgagtgcaacccctaaatggcatttaagttcttcgacatatacatgtgtgttatctatttctgcatattagtttacccccccaacatttagctatttaaaacaagagtaaacattatctcacatagtttctatgggtcaggaatttagaagcagcttagctaggtggttctgggtcagagtctcatgacatagtcaaaacattagccagggatgcagtcgtctgatgacttgcctggaggcagaagctctgcttccacagtggctctcattcatgtggttatcaaatatgtgctgcctgtatgcaggaagcctcagtcactcaataagtggccctctccatagtgctacttaagtatctcacatcattgcagctggcttcccctagactaagtaattcaagaaagaaggcaatgcagaagccacagtatcttttatgtcctagccttggaagtcacacaccattatttctggaatatcctattagttacacaggtcagtcctattcagtgtgggaatggactgcattaggcatggataccaagaggcatgaatcattggggtcatcttggaaagtagctaccacagtgtgtagggatgattttgtaccttcctttccttccccacaaagctgattgttctatttcctcttaagtccatccttggtttgggggcatttttttgtttacttgtttttccatagtagcattagacaggtgataatgggcattggtttataggaagcttcaaagtcagtgaaatgtcagttctgtagttgtttgcagagcacttatatctctgtacaccccatactgaaaataaagtaactgtgctcttaatcttaatttttcttatcataaactcactcttctcttatttttttttttttttgagacggagtctcgctctgttgcccaggctggagtgcagtggcatgatttcggctcattgcaacctctgcctcccaggttcacgccattctcctgcctcagcctcccgaatagctgggactacaggcgcccgccactatgcccagctaatttttggtatttttagtagagtcagggtttcaccgtgttagccaggatggtctctatctcctgactttgtgatccgcccacctcggcctcccaaagtgctgggattacagtcatgagccaccgcgcccggcccactcttctcttttaatgtaaagtctcttacagataatagaaatgtgcctgtagaaatcacagtgattttattgaggttagttctaaatgaaagtcatcttaatctcttttcttcttttgctaggaaatcttttctgctgccacctactgcccataagatggattattctcctcccttgtgctctgtgttccactcccctacttgttagctatatggtcttgggcacattccttaatctatttgtgcttcctttctcctatttgcaaaacagaggtaacagttgtacctatttctcagatttgctgtgtgagctaaatgacatgactgcaaaatacttagtgtggtgtctggcatattggtaagcagtatgctgtcactagtatttactttggtgatgatgttggttattgcagtcacactagattataaatatatgtatttttagatgtctcttttaccttcccatctattgaacaattgctgtatgccagatactgtgctaagcacttcataggcctcatttcataggtgggtggtattactaccattttaccaatgaggaaatgagagatagattaaataacgtgttccaaaatcacacagctattaagttgtacaagtaggcttcatactcaataaatgtttatagagttggtttagttttaagaaagatgtatcagtgtgaagttcagaagagcatctctggttgaaaacaagagactagagtgggttaatgatccatagtcagatcatttataatgaaaatgatcttagcctctcttttaaaccataatgccatttagcgtcactttaccagtgcatatgtaacgggaagggaatgtaaggagaagtaaaatgaactttgctgtttttatgttgtggagtcactatttaaatgtttgagaagaaaagttacagaaattacactaaactaaatccaatgacaatttatcggaattttaaattaataaacattttaatagaaagctcattaattcagattccattgtgtaaaataaatttacagagtgatggtgggaacaaaataagcatgtgccaagatttgtttcttgagttatttctaaaaaggtggtaatctgtgttgtcttgtttcctgatcttgaactagtttcttcccagccaccaagaggtcagctcctcctactttacctggcccaggggccagtccatctttatgatgggattgtagagattatgaaatgtaactttactcagtcagtaagctgggtggtcttttaaacctactattgagtattgaatttatagaactttgcctttttttgttttactttttccctctctgtactttgtcttcctctgaaaaagagaactctgttcttctcagcaaggacatgtgtgatttgattttaagtggagctcattgcatcaggcaaaagtttttttgatgaatgtctgtaggactgtgactttcgatatcaaagatatttataatcaaaataattagcgttaaaattatgttcattaagtgatttgaaaataattcaagagaaaaatatgagatcattacaggtctgaagagcatgggtgtctatcaaattttattgttcagaaagtgaatttgtttctggttttatgctcacttaaaaggcttgtgctttttactgtgatcatgcaagcagtcgttgaatttatccaagaaagaggagactggttttggcaatgtcacaagctcacaggctgtagtcagtgaaaggacatctgcacattaatgccaaataggattttgctaaagagcaaattaacataaatgggctggtggccatgtagatgaggtaaaactgatgtcagccagtgtagttaatggctgccgtggccagagctgctctctccatgttggcatgggtgctgatgtagtggtcaaacagatagataaatttctgatgatcagtgcctcccataagtcctggggaagaccagaatgacagttctacctgttatcttcccatactgaaaatgagaaggaaatgctgttggatgatggtcatgcataggttctgagtgtcatcagagcatgtgacatgctgcaataagcatgggtttgtggtgttccaggttttctctggattttttttttaatgcagcctgtgcatgaatcatgaaaatgaacattttatctgagaaaggcttggaggaatctgtggtctagacaggaattgatgttaggttattgatgcacagaatgtggatgatcattaagggtaaaacttctttaaacagggcatatctaaggaaggtcaggagtcacgaatgaagtgttagcatagttcctcagtgattgttagaaaaggtggtcagcctggctttggagagtaggttctgtgtcatataccctttcctgccacctgttcatttgccatactgatgaattaatatgaccccattacatgggctatatgaacctaatgtgtggattctgatgccataatatcttcacttgtgtacatgacaacaagattagaagcagctttagctattttgaaggaaattaaatgaattaaacctaatcattcacattaagagatattcacattccttccccaaaggctgtgctaaatgtatataagggcagcttatcgggaaattaggaagtataatttttatagattggctttagaaatgataaactgaacagctaatccatcatagagttccctatgtgtccttggatattctgtgtctccctctaattcagaaattcaaagtagaaagatccaggaccaaacgttgcattcaaccatgacattggttattctactcaccatagcacatggtagatctacaaatcccttcagtcctagagagaaaaaaacttctgagtctgcctttcggtgtcaccaaccttgatggcattgtggcttctagagagatggcttttcaaagttgcccatcccagtcaagctacctctcttgctcagggcttagtgtgaaatctttgggagaaaatttggccagcagtaccttctctgtcattaagagagatgacaaggatgcaacttgatagccactaaaacagcagtctactaaaccaatttggacacagttagatgcccacttaaatgttaatggatgctgtgaaataataatagaccttaaaaggggggaggagataatggttagttgtagagttgtacgtatttctaaaagattagggcaaagtaagctctaagtaagttctacgtcaagatttgactacaagatgctttccttttcttaatttttaatttttgtggggacatagtaggtgtatatatttatgggttacctgagatattttgatatagacatggaatgtgtaataatcatatcagggtaaatgggatattcatcacctcaagcatttatcctttatgttacaaacaatccagtcatactttgttattttaaaatgtacaattaaattatttttgtactgtagtcaccctgttttgctagcaaatactaggtcttatacatttttttttttgtacccattaaccatccccacttcccccacccccgctacccttcccaacctctggtaacaatccttctctctaactccgtgagttcagttgttttaaattttagctcctacaaataagtgagaacatgcaaagtttgtctttctctgtctggcttatttcacttcacataatgacttcagttccatccatgttgttgcaaatggcaggatctcattctttttctttttcttttctcttttctttcttctctctctctctcttttttttttttttttttttttttaaagacggtatcttactgtgtctcccaggtggtcttggctcacttgcagcctcaacctctctggctcaagcagtcctcccacttagcctcccatctttctctcttatggctacatattaccccattgtgtatatataccacattttcttttatccattcatctgttgatacaagatgctttattaaattgactaagtgaattggtactgcagttgctgtttcttttttgctggttgtctgtcttccatctctatgaataatgaagagggtctgttctgcccatcaacactgacccacgttactttcattgcctccacctatttacttacttaagcagatggcatattgtaacatggttcaaatttttagcaagttttcccagctgtgcactgttcatttattttcaagtgaactagactccagctgagtgttcatatacagctgatcccagctgtagcaagagctttgactgaaatggtctctggctccctgagtctgcaacttattcaaagacactgtcttcccggtaccaggaccatgctgaggcatgaacttaaatccaagaatagagaaattcagatttcatagtgttggccttatttaaaacaacgttccaaataacagcttggaaggccatacagttcacagcctgcagttgaaacagtgtacttgttctcttttgttgttatagcattgctcatgctctctcttgggactttttgacttgcagatgctaatactggagaccgtggacagaccaataatgctgcttctgcatcagcttccaactccacctgaacagtcccgagcagccagctgcacaggaaaaaccaccagttacttgagtgtcactcagcaacactggtcacgtttggaaagaatattaaaaagagaaaaaaatcctgttcattttagtgttcaatttttttattattattgttgttcttatttaaccttgtaaaatatctataaatacaaaccaatttcattgtattctcactttgagggagatccagggggtgggaggggttgtggggagggggaaagcggagcactagaacatacaatctctctcccacgacaatctttttttattaaaagtctgctgttgtatactttaaaaacaggactcctgcctcatgccccttccacaaaagaagaaaacctttttctgtgctgatgggtttttttgaactttgttttcttttaaagtctagtgtgagactttggtatagtgcacagcttgaaattggttgggagcttagcaggtataactcaacggggacttaaatgtcacttgtaaaattaatccatatcttcgggtatttatagacttgcctttggcatgttggtggcaggtgtggcagacaaagaaatgtgtatcattcgtaacccagggaggtcaataaagtttggaactctacagggaagattcttagtagatttgttaaggttttgttttgctctcagttagtgctagtgatgtagaggcttgtacaggaggctgccagaggggaagcagcaagcaagactcaggcacacatgctctacaggtggctctttgtttgcctgaccaaagttctttgcaaatcttagcacagtttcaaactagtgacctgggaggagatggaaggggtgttgagcaggctgagctagctgctgaggtcaaaggctgatgagcccagaggaaggggacaggtcagggatacatctcaccactgtgaataagtttgtccagatttttttctaaagttacttcccttggaaagatacacttgagaggacattgtagttaaataatgtgaactgtaacagtcatctactggtttatttttcatattttttaattgaaaattgagcttgcagaaatagccacattctacacatagttctaattttaaatccaaatctagaatctgtatttaatttgttttttaacctcatgctttttacatttatttattgatgcatgtcagatggtagaaatattaaaaactacacatcagaatgatacagtcacttatacctgctgactttataggaaagctgatgatataaatgtgtgtatatatgttatatatacatatattcaatactgcctttttttttgtctacagtatcaaaattgactggttgaagcatgagaagaatgtttcccccacacccagttaagagtttttgtgtctgttttctttgtgtatcagtgaacgatgttaagaatcagtctctctttttgaagaaaaagcaatattccttggaaagcaaggagaattgaaggactatgtttgccgtgaggaaatagattttcatgactagtttgttttatacttttaaggttggcatctatgtgggccttatatactctaaaatgaactttagtcaccttggtgcttatgggccattacttgacctatgaatctttaaggcacaatcagttgtactttacatttaaagatcacttgagtgatggccgcctttccctcctacccgctccttccccacatgccttccaaggttagctggtaactgtagggctgcagagctgagcccatggttgtgtgtaacttgccctcaccctcctcattgccaccttaggtcactttatgggtctcgtcctccagagggttcggaagtggagtctgttggcagccctcctgcaggccctagcaccctgtcctgctccttaactgtgtgtgtgactctccaagagagttgtcctgcctgctgaagtgaaccagtacccagaaagacaactgtgagccatcttggttttcactcgctgtttagctgaggtcttgggccacaaaaggggtttcacaaacctctggatatatcagagtttatgagaaaggaaacatgctcagtcaaaccaaatcaaacaaattgaattttatgttttataaagtgcttctgaaagctaagatttgaaagaagtctgaaatcaaagtatttggcagcataactccttaaaggtagtggcgttgatagaccattttcagacagaatttataaagaatctgaaaaggcaggtctgtgatagagaaatggacctgcattcagatccaactgcccagcaagcgtttggatgcagacactgctctggacgtggtatactccccagagtccataaaaatcagtgcttattttaggaaacaggttgccccccacaactggggtaaaagaagagagaaaagtcacgcttttctctcatttcattgtgtgtgcatgtgtgcgtgtgtgtgtgtgtgtgtgtgtgctgagatgtgtgatttttctttctcaaggatcatggtgggatcacagaactcttttatacaagtgagatccaggtctctgaatatctttttgtatataataataataaaaagctcctcaccaaattcaagcttgtacattatattttctttctgtgtttttaaatttaagttttattgttttgtatgtaaatatgtggacccaggaactgttattaatgagcaaaaagttactgttcagggcagtgattctgtttaataatcagacaaaatgtagacgagctttttaaagccatatagttttaactctgtacagtaggtaccggcctgtattattgtaacaataactctagcaatgtatagtgtatctatatagtttggagtgccttcgcttccatgtgtttttttttttaatttgttcttttttaaattttaattggtttcctttatccatgtctccctgtccaccccctttccctttgaaataataactcactcataacagtatctttgccccttccacagttaagtttcagtgataccatactcaggagtgggaagaggaaatcatattcgtaatttcatttcgttgaagccctgcctttgttttggttctgaatgtctttcctcctcggtagcagtgagaccggtttcatttcatacttagtccattcagggacttagtgtagcaccagggagccctagagctggaggatatcgaatagattaaattttgctcgtctcttccacaagccctaaccatgggtcttaaaaacagcagattctgggagccttccatgctctctctctctcctcttttatctacttccctcccaaatgagagagtgacagagaattgtttttttataaatcgaagtttcttaatagtatcaggttttgatacgtcagtggtctaaaatgctatagtgcaattactagcagttactgcacggagtgccaccgtgccaatagaggactgttgttttaacaagggaactcttagcccatttcctccctcccgccatctctacccttgctcaatgaaatatcattttaatttcttttaaaaaaaatcagtttaattcttactgtgtgcccaacacgaaggccttttttgaaagaaaaatagaatgttttgcctcaaagtagtccatataaaatgtcttgaatagaagaaaaaactaccaaaccaaaggttactatttttgaaacatcgtgtgttcattccagcaaggcagaagactgcaccttctttccagtgacatgctgtgtcattttttttaagtcctcttaatttttagacacatttttggtttatgttttaacaatgtatgcctaaccagtcatcttgtctgcaccaatgcaaaggtttctgagaggagtattctctatccctgtggatatgaagacactggcatttcatctatttttccctttcctttttaaaggatttaactttggaatcttccaaaggaagtttggccaatgccagatccccaggaatttggggggttttctttcttttcaactgaaattgtatctgattcctactgttcatgttagtgatcatctaatcacagagccaaacacttttctcccctgtgtggaaaagtaggtatgctttacaataaaatctgtcttttctggtagaaacctgagccactgaaaataaaagagacaactagaagcacagtagagtcccagactgagatctacctttgagaggctttgaaagtaatccctggggtttggattattttcacaagggttatgccgttttattcaagtttgttgctccgttttgcacctctgcaataaaagcaaaatgacaaccagtacataaggggttagcttgacaaagtagacttccttgtgttaatttttaagtttttttttccttaactatatctgtctacaggcagatacagatagttgtatgaaaatctgcttgcctgtaaaatttgcatttataaatgtgttgccgatggatcacttgggcctgtacacataccaattagcgtgaccacttccatcttaaaaacaaacctaaaaaacaaaatttattatatatatatatatatatatataaaggactgtgggttgtatacaaactattgcaaacacttgtgcaaatctgtcttgatataaaggaaaagcaaaatctgtataacattattactacttgaatgcctctgtgactgatttttttttcattttaaatataaacttttttgtgaaaagtatgctcaatgttttttttccctttccccattcccttgtaaatacattttgttctatgtgacttggtttggaaatagttaactggtactgtaatttgcattaaataaaaagtaggttagcctggaaatgaaattaaaattcacaagtgtgtggtctttatttcagtacccaaccctcttccttcaccctactattttgccgctgcaatatgtagtcacatcaccatttccattcctctaattagggaaacattaatctttgttatacagaacaagatatcaataccacttcttgttctttccaatgattttattccattgtgtagccccaagaggtgcagcttccaccttggaaacctttggatttgatgtagaggaagctttgcagacactgcttagaaaagaaagaaaacaactctgaaagggacagtttttaaatgtgtataagctgctgtctttgattactgtgttcatgatttggtgtggctgtattttcttttaactttcatcctattagtaatggtctttgggggtctctgtaaaatatatggacaccacgaacagtggggctgtacctcccaggtaaccaacacatgttgtgtttgagtctgctcatttccaatactggatgatgtatgtaaacatgttatgtctcttagtgcaaaaagaaacatcatttttttagggctggctcactctgtcaggcctaatctaaaggctagatataaggtcatgtgactgctgcttcaataaaaacaaatttatattc

SEQ ID NO: 2 - DNA, 7711 bp, homo sapiens
cgggcttgtgccgccgccgccgccgccgccgcccgggccaagtgacaaaggaaggaaggaagcgaggaggagccggccccgcagccgctgacagggctctgggctggggcaaagcgcggacacttcctgagcgggcaccgagcagagccgaggggcgggagggcggccgagctgttgccgcggacgggggagggggccccgagggacggaagcggttgccgggttcccatgtccccggcgaatggggaacagtcgaggagccgctgcctggggtctgaagggagctgcctccgccaccgccatggccgctggatccagccgccgcctgcagctgctcctggcgcaatgaggagaggagccgccgccaccgccaccgcccgcctctgactgactcgcgactccgccgccctctagttcgccgggcccctgccgtcagcccgccggatcccgcggcttgccggagctgcagcgtttcccgtcgcatctccgagccaccccctccctccctctccctccctcctacccatccccctttctcttcaagcgtgagactcgtgatccttccgccgcttcccttcttcattgactcggaaaaaaaatccccgaggaaaatataatattcgaagtactcattttcaatcaagtatttgcccccgtttcacgtgatacatatttttttaggatttgccctctcttttctctcctcccaggaaagggaggggaaagaattgtattttttcccaagtcctaaatcatctatatgttaaatatccgtgccgatctgtcttgaaggagaaatatatcgcttgttttgttttttatagtatacaaaaggagtgaaaagccaagaggacgaagtctttttctttttcttctgtgggagaacttaatgctgcatttatcgttaacctaacaccccaacataaagacaaaaggaagaaaaggaggaaggaaggaaaaggtgattcgcgaagagagtgatcatgtcagggcggcccagaaccacctcctttgcggagagctgcaagccggtgcagcagccttcagcttttggcagcatgaaagttagcagagacaaggacggcagcaaggtgacaacagtggtggcaactcctgggcagggtccagacaggccacaagaagtcagctatacagacactaaagtgattggaaatggatcatttggtgtggtatatcaagccaaactttgtgattcaggagaactggtcgccatcaagaaagtattgcaggacaagagatttaagaatcgagagctccagatcatgagaaagctagatcactgtaacatagtccgattgcgttatttcttctactccagtggtgagaagaaagatgaggtctatcttaatctggtgctggactatgttccggaaacagtatacagagttgccagacactatagtcgagccaaacagacgctccctgtgatttatgtcaagttgtatatgtatcagctgttccgaagtttagcctatatccattcctttggaatctgccatcgggatattaaaccgcagaacctcttgttggatcctgatactgctgtattaaaactctgtgactttggaagtgcaaagcagctggtccgaggagaacccaatgtttcgtatatctgttctcggtactatagggcaccagagttgatctttggagccactgattatacctctagtatagatgtatggtctgctggctgtgtgttggctgagctgttactaggacaaccaatatttccaggggatagtggtgtggatcagttggtagaaataatcaaggtcctgggaactccaacaagggagcaaatcagagaaatgaacccaaactacacagaatttaaattccctcaaattaaggcacatccttggactaaggtcttccgaccccgaactccaccggaggcaattgcactgtgtagccgtctgctggagtatacaccaactgcccgactaacaccactggaagcttgtgcacattcattttttgatgaattacgggacccaaatgtcaaactaccaaatgggcgagacacacctgcactcttcaacttcaccactcaagaactgtcaagtaatccacctctggctaccatccttattcctcctcatgctcggattcaagcagctgcttcaacccccacaaatgccacagcagcgtcagatgctaatactggagaccgtggacagaccaataatgctgcttctgcatcagcttccaactccacctgaacagtcccgagcagccagctgcacaggaaaaaccaccagttacttgagtgtcactcagcaacactggtcacgtttggaaagaatattaaaaagagaaaaaaatcctgttcattttagtgttcaatttttttattattattgttgttcttatttaaccttgtaaaatatctataaatacaaaccaatttcattgtattctcactttgagggagatccagggggtgggaggggttgtggggagggggaaagcggagcactagaacatacaatctctctcccacgacaatctttttttattaaaagtctgctgttgtatactttaaaaacaggactcctgcctcatgccccttccacaaaagaagaaaacctttttctgtgctgatgggtttttttgaactttgttttcttttaaagtctagtgtgagactttggtatagtgcacagcttgaaattggttgggagcttagcaggtataactcaacggggacttaaatgtcacttgtaaaattaatccatatcttcgggtatttatagacttgcctttggcatgttggtggcaggtgtggcagacaaagaaatgtgtatcattcgtaacccagggaggtcaataaagtttggaactctacagggaagattcttagtagatttgttaaggttttgttttgctctcagttagtgctagtgatgtagaggcttgtacaggaggctgccagaggggaagcagcaagcaagactcaggcacacatgctctacaggtggctctttgtttgcctgaccaaagttctttgcaaatcttagcacagtttcaaactagtgacctgggaggagatggaaggggtgttgagcaggctgagctagctgctgaggtcaaaggctgatgagcccagaggaaggggacaggtcagggatacatctcaccactgtgaataagtttgtccagatttttttctaaagttacttcccttggaaagatacacttgagaggacattgtagttaaataatgtgaactgtaacagtcatctactggtttatttttcatattttttaattgaaaattgagcttgcagaaatagccacattctacacatagttctaattttaaatccaaatctagaatctgtatttaatttgttttttaacctcatgctttttacatttatttattgatgcatgtcagatggtagaaatattaaaaactacacatcagaatgatacagtcacttatacctgctgactttataggaaagctgatgatataaatgtgtgtatatatgttatatatacatatattcaatactgcctttttttttgtctacagtatcaaaattgactggttgaagcatgagaagaatgtttcccccacacccagttaagagtttttgtgtctgttttctttgtgtatcagtgaacgatgttaagaatcagtctctctttttgaagaaaaagcaatattccttggaaagcaaggagaattgaaggactatgtttgccgtgaggaaatagattttcatgactagtttgttttatacttttaaggttggcatctatgtgggccttatatactctaaaatgaactttagtcaccttggtgcttatgggccattacttgacctatgaatctttaaggcacaatcagttgtactttacatttaaagatcacttgagtgatggccgcctttccctcctacccgctccttccccacatgccttccaaggttagctggtaactgtagggctgcagagctgagcccatggttgtgtgtaacttgccctcaccctcctcattgccaccttaggtcactttatgggtctcgtcctccagagggttcggaagtggagtctgttggcagccctcctgcaggccctagcaccctgtcctgctccttaactgtgtgtgtgactctccaagagagttgtcctgcctgctgaagtgaaccagtacccagaaagacaactgtgagccatcttggttttcactcgctgtttagctgaggtcttgggccacaaaaggggtttcacaaacctctggatatatcagagtttatgagaaaggaaacatgctcagtcaaaccaaatcaaacaaattgaattttatgttttataaagtgcttctgaaagctaagatttgaaagaagtctgaaatcaaagtatttggcagcataactccttaaaggtagtggcgttgatagaccattttcagacagaatttataaagaatctgaaaaggcaggtctgtgatagagaaatggacctgcattcagatccaactgcccagcaagcgtttggatgcagacactgctctggacgtggtatactccccagagtccataaaaatcagtgcttattttaggaaacaggttgccccccacaactggggtaaaagaagagagaaaagtcacgcttttctctcatttcattgtgtgtgcatgtgtgcgtgtgtgtgtgtgtgtgtgtgtgctgagatgtgtgatttttctttctcaaggatcatggtgggatcacagaactcttttatacaagtgagatccaggtctctgaatatctttttgtatataataataataaaaagctcctcaccaaattcaagcttgtacattatattttctttctgtgtttttaaatttaagttttattgttttgtatgtaaatatgtggacccaggaactgttattaatgagcaaaaagttactgttcagggcagtgattctgtttaataatcagacaaaatgtagacgagctttttaaagccatatagttttaactctgtacagtaggtaccggcctgtattattgtaacaataactctagcaatgtatagtgtatctatatagtttggagtgccttcgcttccatgtgtttttttttttaatttgttcttttttaaattttaattggtttcctttatccatgtctccctgtccaccccctttccctttgaaataataactcactcataacagtatctttgccccttccacagttaagtttcagtgataccatactcaggagtgggaagaggaaatcatattcgtaatttcatttcgttgaagccctgcctttgttttggttctgaatgtctttcctcctcggtagcagtgagaccggtttcatttcatacttagtccattcagggacttagtgtagcaccagggagccctagagctggaggatatcgaatagattaaattttgctcgtctcttccacaagccctaaccatgggtcttaaaaacagcagattctgggagccttccatgctctctctctctcctcttttatctacttccctcccaaatgagagagtgacagagaattgtttttttataaatcgaagtttcttaatagtatcaggttttgatacgtcagtggtctaaaatgctatagtgcaattactagcagttactgcacggagtgccaccgtgccaatagaggactgttgttttaacaagggaactcttagcccatttcctccctcccgccatctctacccttgctcaatgaaatatcattttaatttcttttaaaaaaaatcagtttaattcttactgtgtgcccaacacgaaggccttttttgaaagaaaaatagaatgttttgcctcaaagtagtccatataaaatgtcttgaatagaagaaaaaactaccaaaccaaaggttactatttttgaaacatcgtgtgttcattccagcaaggcagaagactgcaccttctttccagtgacatgctgtgtcattttttttaagtcctcttaatttttagacacatttttggtttatgttttaacaatgtatgcctaaccagtcatcttgtctgcaccaatgcaaaggtttctgagaggagtattctctatccctgtggatatgaagacactggcatttcatctatttttccctttcctttttaaaggatttaactttggaatcttccaaaggaagtttggccaatgccagatccccaggaatttggggggttttctttcttttcaactgaaattgtatctgattcctactgttcatgttagtgatcatctaatcacagagccaaacacttttctcccctgtgtggaaaagtaggtatgctttacaataaaatctgtcttttctggtagaaacctgagccactgaaaataaaagagacaactagaagcacagtagagtcccagactgagatctacctttgagaggctttgaaagtaatccctggggtttggattattttcacaagggttatgccgttttattcaagtttgttgctccgttttgcacctctgcaataaaagcaaaatgacaaccagtacataaggggttagcttgacaaagtagacttccttgtgttaatttttaagtttttttttccttaactatatctgtctacaggcagatacagatagttgtatgaaaatctgcttgcctgtaaaatttgcatttataaatgtgttgccgatggatcacttgggcctgtacacataccaattagcgtgaccacttccatcttaaaaacaaacctaaaaaacaaaatttattatatatatatatatatatatataaaggactgtgggttgtatacaaactattgcaaacacttgtgcaaatctgtcttgatataaaggaaaagcaaaatctgtataacattattactacttgaatgcctctgtgactgatttttttttcattttaaatataaacttttttgtgaaaagtatgctcaatgttttttttccctttccccattcccttgtaaatacattttgttctatgtgacttggtttggaaatagttaactggtactgtaatttgcattaaataaaaagtaggttagcctggaaatgaaattaaaattcacaagtgtgtggtctttatttcagtacccaaccctcttccttcaccctactattttgccgctgcaatatgtagtcacatcaccatttccattcctctaattagggaaacattaatctttgttatacagaacaagatatcaataccacttcttgttctttccaatgattttattccattgtgtagccccaagaggtgcagcttccaccttggaaacctttggatttgatgtagaggaagctttgcagacactgcttagaaaagaaagaaaacaactctgaaagggacagtttttaaatgtgtataagctgctgtctttgattactgtgttcatgatttggtgtggctgtattttcttttaactttcatcctattagtaatggtctttgggggtctctgtaaaatatatggacaccacgaacagtggggctgtacctcccaggtaaccaacacatgttgtgtttgagtctgctcatttccaatactggatgatgtatgtaaacatgttatgtctcttagtgcaaaaagaaacatcatttttttagggctggctcactctgtcaggcctaatctaaaggctagatataaggtcatgtgactgctgcttcaataaaaacaaatttatattc

SEQ ID NO: 3 - DNA, 1636 bp, homo sapiens
atcatctatatgttaaatatccgtgccgatctgtcttgaaggagaaatatatcgcttgttttgttttttatagtatacaaaaggagtgaaaagccaagaggacgaagtctttttctttttcttctgtgggagaacttaatgctgcatttatcgttaacctaacaccccaacataaagacaaaaggaagaaaaggaggaaggaaggaaaaggtgattcgcgaagagagtgatcatgtcagggcggcccagaaccacctcctttgcggagagctgcaagccggtgcagcagccttcagcttttggcagcatgaaagttagcagagacaaggacggcagcaaggtgacaacagtggtggcaactcctgggcagggtccagacaggccacaagaagtcagctatacagacactaaagtgattggaaatggatcatttggtgtggtatatcaagccaaactttgtgattcaggagaactggtcgccatcaagaaagtattgcaggacaagagatttaagaatcgagagctccagatcatgagaaagctagatcactgtaacatagtccgattgcgttatttcttctactccagtggtgagaagaaagatgaggtctatcttaatctggtgctggactatgttccggaaacagtatacagagttgccagacactatagtcgagccaaacagacgctccctgtgatttatgtcaagttgtatatgtatcagctgttccgaagtttagcctatatccattcctttggaatctgccatcgggatattaaaccgcagaacctcttgttggatcctgatactgctgtattaaaactctgtgactttggaagtgcaaagcagctggtccgaggagaacccaatgtttcgtatatctgttctcggtactatagggcaccagagttgatctttggagccactgattatacctctagtatagatgtatggtctgctggctgtgtgttggctgagctgttactaggacaaccaatatttccaggggatagtggtgtggatcagttggtagaaataatcaaggtcctgggaactccaacaagggagcaaatcagagaaatgaacccaaactacacagaatttaaattccctcaaattaaggcacatccttggactaaggattcgtcaggaacaggacatttcacctcaggagtgcgggtcttccgaccccgaactccaccggaggcaattgcactgtgtagccgtctgctggagtatacaccaactgcccgactaacaccactggaagcttgtgcacattcattttttgatgaattacgggacccaaatgtcaaactaccaaatgggcgagacacacctgcactcttcaacttcaccactcaagaactgtcaagtaatccacctctggctaccatccttattcctcctcatgctcggattcaagcagctgcttcaacccccacaaatgccacagcagcgtcagatgctaatactggagaccgtggacagaccaataatgctgcttctgcatcagcttccaactccacctgaacagtcccgagcagccagctgcacaggaaaaaccaccagttacttgagtgtcactcagcaacactggtcacgtttggaaagaatattaaaaagagaaaaaaa

SEQ ID NO: 4 - DNA, 271987 bp, macaca fascicularis
  misc_feature (18309)..(18337): n is a, c, g, or t
  misc_feature (67023)..(67032): n is a, c, g, or t
  misc_feature (133315)..(133964): n is a, c, g, or t
  misc_feature (153521)..(156620): n is a, c, g, or t
tgcagcgtttcccgtcgcatctccgagccaccccctccctccctctccctccctcctacccatccccctttctcttcaagcgtgagactcgtgatccttccgccgcttcccttcttcattgactcggaaaaaaaatccccgaggaaaatataatattcgaagtactcattttcaatcaagtatttgcccctgtttcacgtgatacatatttttttaggatttgccccttcttttctctcctcccaggaaagggaggggaaggaattgtattttttccccagccgtaaatcatctatatgttaaatatccgtgccgatctgtcttgaaggagaaatacatcgcttgttttgttttttatagtatacaaaaggagtgaaaaaccaagaggacgaagtctttttctttttcttctgtgggagaacttaatgctgcatttatcattaacctaacaccccaacataaagacaaaaggaagaaaaggaggaaggaaggaaaaggtgattcgcgaagagagtgatcatgtcagggcggcccagaaccacctcctttgcggagagctgcaagccggtgcagcagccttcagcttttggcagcatgaaagttagcagtgagtattgattttattttacgccccttttccacttcgcccttaaaataagaaatctcggaataccaggatctgaaaatattagacttcctaatataacaaacaagcaatggaaaagggcaaaacctatcttcagtcaaggatgaagcagctccctctttactcctcccataccccctcccccggtctcattaaccttgaattgagataatatgatttttatttggatgattcgatttgaaactgctttcttatacttttcttgctgttggtagtcagtttcatcaagtgcttgagtgtttccacgttagtgatgaccgtgtttacttgcccatcctttagaataaagagaaggacaagatttgattaataaaccattgtgcacatttgcagaatgtatgtcttttggaataagagggtattttaggtctcaggatttatcatagtttggtatacttaatagagacattaaacgtcccaccctcccaacatttttttcttgtctgtatgactacacatagtatttgttcttaatctgtggatgaacttgctcagtaaccattcacatttggaggctgtcattgatttctctctttagaagggactagtgggagccaataaatacccagcagcagtagcatctctgtatgcatttgtgttcgattggattagtggtttgatgtgttctctcttaaccttcctgttttgacattaccaacctgccaccgtataatttatatttaatcaaaaggtaacatggaagtattaataggtccaggttttgattgagatttgttttgtcatagtgccaaatagtaagttaaatgttgtcactggctcattacatttaagttcaattttggagtactgttgcgctcctgttaaatgttctggggggttccttaaaaaggacgatttaaaatactcttgcgttagtttccatcacatttagataactgtggatttagttagaagaatgtggatttagtcctttccattttggcttttgcagatggctgtggtcctgcaaataatagggatatttggactgtgttcagggttgtagatagactactcttgtcctgggtttgtgctgagaagtatgcttttgaatgtttagtatatactaagtatctaatgttccagtgtatctctatttatggagaagttcatgtggtgtttaatgacagcttgtttaaacatactttcagaatttaacaaaaatatctatgttgtttccttattgtgggaaagagggtcatcatgagggcaaagaaattactgtgttgcttagaagaacggagagaactaaagaactgagattttaagaactgacacacacaaaaaacatgtatgttatgtgaaattgattatattcttaggcaacataaaatgatcacttttagttgaactcaagatttcatttcgtgttggctttgggaactagcctgaaacagggtagtctaggtaatagctgaatgggagattatttttcaaagttaatttttttttcccccggtggtttgcaagtagagaatgccggggtaggaaaagaggacagctgattatgcatctttcagggaagggtcgtgctttctaagcgcttcatggagtcatttgaaaaatattttaaaattccggggtaattttcagctatgatgatacaaatcttataataactacttaagagcctcttgtggtactggagtgtttgtatgttttacatcttggtaatatagtttgaaaaccagtcaatcaatttcagctaattgatttattagctttatttcagagatctataatgctagattataatgctacattttgggacttttcattttctttccaggattttctttgaaatgacttttgaatttttgataatgcagatactaaggatggagtaactcttgtaaaatatatagatgaaaatgtttattttccgattaccgtataggtcaatttagaatttaaaaagttggagtttagtgttaattatgtgtttttgacagctttgactttaaaaacatttaaaagaaaggggagtctttaagcatttgttaggatgctagcattctaaggaacccctgttgaaaacagaaacataagaaattgtagtccttgctctcaaaagcttatttggttgtagagggaggctatgggaaaaaaattaaaacaatagcatgatgactgctagattgtaaaatacaaattgaatcatttgttcagaggggcaaagagtaaaagggtgagactgatgggtgggagaggaaagacttcctgtggacaaggggtattaagactgatactaaaggacgtggtaacttgaactggtagaaaagcatgaaaggtctaggtggaaggagtgtaccaaggcacaaagatgatgaattttgcatgagaggcaataatcaagttggcaaatctgagttaaaggggcctacgtaagaacataagaacaaatggaatttgagaaataaaagaaagttagctgatggagggcagagggattctgtaaaagtttgattgagattcaaaagagatctggatttactgttggctgctgaacaagatgtaagatgatttttgcagttgaattaatgaattatagtagagagatgctagagcctttttagggagctagtagggtatgttgtgaatcatgagggactaaagtaaaatgtgaaaatggggtgaaaggaacaggtttgagagacagtgtgaatgaagaactggcagaacttcatactggactgaagtggaatatttgtgaaggagtcaagagttaaaaataaatactgatgttactggcctggaagacttcactgctgagttatattgttaattgtaatgggaaaattgagaaagtgctgaggtgagagggtaggtgagttcactttcttaaactttaatatacaataagttcccttgaaattcagacagcagttagttactggcaatgatatttgacttcctagtctattaattgcacagtttcttatttttctacacctaaaatgttggatttatatttgggagcagtaaactaagggcttttatttaaatgcttttcatcaaattccaattttttttttttttttaaatacagcttcaaaagcctcacacttgaaacctagttataatagtttcatgatagtttatttcaaaacaatgaaaacactttttggactaaactgtgacagaaacattttaaatattttatgtagccattaacctttgatacatgcttaaaacttttttataaataatgattattattttacatgcaagatttatttaggaataaagtattgagatccttcactttgtgaagactccagaataaattaaaagttgattttataacaagtagtttttgccctttttgttgagtttaggcattaaccccaaatttaaatcagtatatttgagatactactttttacttgctatagcgaaaccaatgtttcatttttgttcacttccaagtttacgtgtaattaaataaatgtttataaagtttttctttagaatcgcatgatattttactcaatagggaaagtaagggactgtggcacttttggctaaaatattagtaataactccttttggtatacagttggagaaaatttaactagttgtttaggtttaatgcttaaatataagatttagaaagatgaaaataagtttgtatcacttaagttgtttcttcatataaaacttttttagatcaaaatttctattagcaaagagagaataatagtagctgcatattattctgcagtattaggtcatatggtgattaaagccaaagaataggtagcaacttagagtttccgtattcccctgggaagtttaatctctttacgacatctaaaaattaggtggttagagtttagcccatttcttgataatcttgtgttaatgtggaaaagagttcatgtgtgagactgaaaaccagaatcctattttcagtcatttcccaacccaacttccccagagttgttaaaacatttaagatatttaagaattgtatgctttcttgttgcatgcacctgtagaatgctaattgtgaagtgacaataagtcacaggcaaaaggaaaaacttcaagggatcccagagattcacaaatcaccttatggctgatcaggaactacatttagaaaatgaggtgacatcttctcgtttcactggcaaagttcagctgaaaatcagtacttgcaccctttactgtctatcccttgtattagaattgagttgcaggtgtgagataatactttggagaaacagcaaggctgggaaagtcagagattttgttccagcagcagagtctaaagagtgggagagccctatttgtgtgtgcactgtatgcatagagaaggctgtgaaacgtgcatatgttgaccctgttgtcacagttccgtacttttaaataagacccatgaggttgagacagggaaggagaggacaggatgtgagattgtggtgcctcttgtgttgctccaccctataatggagaatggaggggcagaatgcttgcgtgggtgagacaagagtgtgtgttggtactaacaggaccaaccgggttccccagatattgttctactaagaacataatcaccatgataagtaaattaatttgttggaatgtttatcatcattttctagctgattttttttgggggggggtggtgttggaaggggagttttgcccagtttcaagaataaaagcattttcattgttcagaagaagagcattttcattaaagcggaggttgcactcttggctttttatcttaagttatacaaatcatccttggttatacaaatcaaattgcttttgaaatttgttgagtgtaatgtataaatgtatatttatataaaaacctgtgtgaatagaacagcaaggaaaaacagggtagagttaaataacagtttgttttccctgaagttttctacctttaaatttatataaaaaagaaatatttattccattttgcattattgagttttctagtttttttttaatgagctaatactcagtacataatggacatttttagtaaattattctaatatacttgtgactgtaatgcatttgatgtggtataagatttagaaacacaatttagtttggctgggcatggtggctcacgcctgtcatcccagcactttgggaggccgaggcaggtggatcacgaggtcaggagatcgagaccatcctggccaacatggtgaaaccctatctctactacaaatacaaaaattaggccgggggggcgggggaggcgtggtgacgtgcgcctgtagtcagtcctagctactcaggaggctgaggcaggagaatcgcttgaacccatgaggtggaggttgcagtgagccgagatcgtgccactgcactccagcctgggcgacagagcgagactctgtcttaaaaaaatacaaaaaaacacaatttagtcgatttgggttcttagtttataattccccttcccatttttgcttatattttgggaagacaggttgacttccaaacaatgtgcaggttccaattttgtatgtgattaaatcttacattttttgtattgaatagttttcctagcatttttggtttgatcacttgaagtaatgatgtatttgtcttgaaactagttttgtcaaaccagctttttattttcagagtaccatggttagttaacaacagcacaaagccaagtccttaacgtgttcccttaataacgtgatctgaggttaatttcttgattcttatttcaaatcaatttagtaataaaaagttcacatttcttttttttttttttgagatggagtctcacactgttgcccgagctggagtgccatggtgccatctgggctcactgcaacctctgcctcccaggttcaagcagttttcctgcctcagcctcctaagtagttgggattacaggtgcctgccaccacacctggctaattttttgtatttttagtagagacgggtttcactatgttggtcaggctggtctcaaactcctgaccttgtgatcttcccaccttggcctcccaaagtagtgggattacaggcgtgagccaccacacgtggccgaactaaattgtgtttctaatttagtttccccaaagagtaacagctatacatcagtgtggaattgggttatttggaatctcaccttactggaattggctggtagttgacagtaaaccggaagctctcctgagcagctaatatctgcaggcaaatggagtataaactttgctcataggttagtcttcaggcttttattaatggttctttgttattatttaacacatagttgtaattcattgagtcgtctggtttttttgaaatcacaaatcagagggaaatggatagatactgattaagcattatgctactgaagggaatggatgatttggggaaacaagcatattgggattacttagtgtatgtagtgtatgtaagttcatacagatccagagtaaatcactctgataattgttcaaaacgttcacccagagaaattttctttttttttttttgggagacagggtctcgctgtgttgcctatgcctagcctggagtgcagtggtgcagtcttggctcactgcagcctctgcctcctgggcttggtgatcttttaacctcaatctctggagtagctgggactataggcacgcgccaacatgcctggctaatttttgtagtttttgtagacagggggttttgccatcttgcccaggctggtcttgaactcctggaatcaagcagttctgcctcagcctcccaaagtgctgggattacagtcatgagccactgcacccatccgagaatattaattctgttttaaagaggcaggaggtagaaaaatctcttctggaggcctgggcttctgcataagctacataaaacatctgtaatttgttgatcactgacgtgatgaagagaactgggtcatctctgtctgattcaccatcttctagctgaatttcagcaatatggataaaggtactaaagtcttcagtgtgctagcccaaggtattgtttccaactctttcttccattgtccatctacatttattaactcagcagcagagttttatctgatttaagatttgttgtcttactgtttctggtttttttttttttccccttccttggtatatatggaattgctgcctggattttggctggcttgtaccttttgtttgtggactgcttagaaggcactgcatggagtcatttaagctttcttatgaattataaatagctatttagagaggaactttaccagatacatttatggcctatgagaattgaaaagctggccatcttaattgttggactgaagaagaagggtgatagtggcaaagtagtttttcttttggaggtctgagaaattcttaggggcttaattggctaatataactagaaaggttgggtgttttagatttttttcgaaggataggtatcttctttaaatgcaacgctgtctacttcctgttactttataaaattaactaattttactttttttttaactttattttattttattttttgagacggaatatcactctgttgcccaggctggagtgcagtggcacaatcttggctcactgcaacctccacctccctggttcaagcaattcccctgcctcagcctcccgattaactgggattacaggcatatgccaccatgccccgctaattgttttagtatttgtaggagagacggggtttcaccattttggccagactagtcccaaactcctgacctcaggcaatctgccgacctcggcctcgacaaagtgcagcaaaatcagttaatactttttaattgattaacactttcttcatgacttgtgttgaagttgttgagttgagtcaagtaaatttctgatgctagattttgagtatgtggtgtgagcacctgaagagttagaggtactggtattatgtctgacatcagactgatagtatttgcagggacatttgccctagtggaattgcagggttttcacattctacacattacttaaattatgaaagaaagggggaagctttgagttggtggagttttaataataagatataattacatgtgtatggaagagcaatgtactgtatatcatatttgcataatacatggcaataatggcagtaattattgagtgcagtgtgccggataattgcatgttttatttacctattttgctttaaattttaaaaaatgtaatttactcacatggttcaacattttaaagatattcagtgaagtctttcttctctcttgctctgcagcaaccggttctctttcctggagaccactggcattacaatttcttatatgtcctttcataggtattctgaatctttacagattactgatttctatagtagacttccattttgtgtatacatacataaattaacaatagctttagcagaagtgttagaattaaaacaaatttaaatcactaactctagaaaattgctatttttcaacctattaagttagtaaatatttatgtctctgaatgtaagttagttggagaataagtgcaatgatgacagagctcctctcgtggcaattagaggtaaaatgttaatagtcctaaccaatgaacaattaatagcacatttaaaataggcgtttatttcatggtaaagaaaaagacaaaggataattttttaactttctatttttctaacatctcagatgagaaaacctgttctcttgagagatcagaggcgcagagtgcgtcaatgtcaatgaagcctgtgccttttacctctttaagagcgtatggtttcattctgctcctaaatcaagcaccccttagttgttgaataaaaattacttttataaaggaatatatttatgtgatttaaagaaatcaaatagtgcagaagggcttatgatggaaagtaatcttctgtcttccagtcctacttcttagaagcaacattggctatgacagctgtttcctctagtagtttttatcatatttttaattatatactttttatctgtttcttaaaattaattttattttttttgtcttatagtggtagacatcatttattatcatacccatctcccttttgctttcatactgatataattataccactatttaaaaactattatttatttaaattattatgcaaattctcagtatgtagacatggaacagtattctatgtagaaacaagtagtacacagtgatcatgtttccttatgagaatagttttattgagatataattcacataccgtaacattcattttttcagttcacagatgttcacagacttgtgtaaccatcccaaccatctaattttagagcacttttatcatttcagaaataaagcttatacccattagcagtcattccctgtgttccccttccccacagctctaggcaaccactggtctactctttgtctttatagatttgcctgttctggacatttcatataaatggatttatgtaatacgtggccatttatgactgttttgcttagcataatgtcttcaaagttctcccatgttatagcatgtattagtacttcattcctttttattgctgaataacatttcattgtatggaaatcccacaatttgtttattagttgatggacatttgggttgtttctgctttttgactagtatgaatatgctgctgtgaacatttgtgtgcaagtttttgtgtggacatatgtatgtacctaagtagtggaatggctgggtaataatggtaactctctgtttaacgtgttaaggagcattaagctgtttcaaagtggcagtcacattttttcctttgcttttaatctttttagacttcattgttgccattatctttctttctttttttttttttgtactgatggtaataattataatctcaattcttccccccaaatgtacccatttatcagacattctctgaatttctacctgcctcttgctccctttcttttcctggagccctcgtcgaactgctgggatctgacctggttgttctccaggctccgttgtacagctgtcatcctctgacttctttcattgctcttcagggttggctctccagtttcctgggtcccatgtctttgtatcattgaatagttctcatctgataactgtttgataaatatacctggaaaagttgttcattgtttttttccatatttgttccaaaaggtcagttaagaagctatacaccttttgggcagatatcctcacccttgcagtatctagatactgagaaatagatgctcgaagtttactttgtatcattttatcaagtgattaccatgccaatatgaggcaagtacaaaaatctgaaaaatattaatattaagtaattgtttagactagagcttttcagaagaaatattatataagccaaaaatgtgaattatatatgtaattttaaattttctgtgaaccactttgaaaaatagacacaagtgaaattaattttagtaatatattttatttaacctagtgtatccaaactaataatatatcaagatgtaatcaatataaaaattattgagatattttacattctttttttgggtagtaaatctttataacctagtgagtgttttacacttaaagaaaatactgatttggggttcgggcgcggtggctcatgcctgtaatcccagcactttgggaggctgaggtgggtggataatgaggtcaggagttcaagaccagcctggccaagatggtgaaaccccatctctactaaaaatacgaaaattagctgggcatggtggcggacacctgtaatcccagctactcgggagactgaggcagagaattgcttgaacctgggaggcagaggttgcagtgagctgagattgtgccactgcactccagcctgggtgacacagcgagactttttctcaacaacaacaaaaaagaacatactaatttgggctagccacatttcaagtgttcattagccgcatgtcgctagtagttactatattggacagtgcaggcttagaattttgtccaggaattatattatttttgttattcttaagtaatggaaaagatgtgtgtggtttaaaaacatttcattgatttgtgcctttgttgttaatcatgttctcagcttatttttaaattttatatcacattaaaagaggttgaagattgttatgtttttcagaaaggggcttgctgtagggtgggtagtgattctttccactcttatttagtaaaactgttaaaatagctattgaaatttttgctgttaagataattagatgttggccccagtggaattttatccatgcaaatatactttgttgtatgttatttccctttgctgtttcaaagacctggctggctttcagtctcaaataccacctcaactcctattcatgcttaccacaaggcatgaaattcacttgcgtatgactccttcggcactctctgtggcccttctaatgttcttccttgtattctcgttaacgtgtcttgtttctctgtaggggatcataagttccaacatgacataaaaatgttttatgcatctttgtatttcctgcagtgtggagcacattcctttttgtattgggacacttagtatatattctagttgaaggcagtttgtcatgtgatatggtgtctagtggtatgctagtttccaggtcaccaaccaattgctgatgtttctagaacatttaagttttgatataagaaattaagttaaatttgttttttgtttgtttgtttttttgagatggagtcttgctcttgccaggctggtgtgcagtggcgtgatcttggctcactgcaccctccgcctcctggattcaagcgattctcctgcctcagcctccccagtagctgggactacaggcacgcaccaccacgcccagctagtttttgtatttttagtagagacagggtttcaccgtgttggccaggatggtgtccatctcctgacctcgtgatctgcccgcctcccaaagtgttgggattacaggtatgagccactgtgcctggccctgtttttttttttttttttaattttttttaatgtgaaggaatgatagtaggaaagagatgtagagacatagaaatacagacatttctgttgcgctatgtgcttagcgctgagtagctctgaaatctttggatggatgactgaatgaaaacaaggacttgggtgctaggttacactggttggtaagcacagtacctttgaaacattgagcctgtgaagctactatggtatccccttccattattttatttggagtgggtaaggactgaagagagatttgtagcagtgaaacctgacaattcagtttctttccttacgccaagtagcttactctgcaaaagaataaagtaaacagacaatatttaaatatgaaaagtcctttcatcatggatgtacttaggtgtgtaattgtattgtgggggaggtgtaaaactattttttttttttttgagactaagtctcgctgtgttgcccaggctggagagcagtggcgcgatttggctcactgcaatctccacctcctgcgttcaagcgattctcatgcttcagcctcccgagtagctgggattataggtgtccaccaccatgcctggctaatttttgtgtttttagtagaggcagggtttcacagtgctggccaggctggtctcaaactcctgtcctcaaatgatcctggcctcccaaggtgctgggattataggcatgagccactgcgcctggccgaaactaatttttacaagacttctttttgggtctttaagatgatgttcgtttgtttcatatattagtatgtcaattctagagctttcccagagagggtgagaaatattaataaacaatagggattctattgctaaataatgcaacttttttttttttttaattagaggaaagagtgtggtcgtcttcttccttcttcttccctccccctcctcccaacttcttttggaggcagaatcttgctctgttgatcgggttggagtgcagtgatgtgatcttggctcactgcagcctcaacctcatgggctcaagcaatcctcccacctcagcctccacattagctgggtccacaggagtgcgccaccatgcctggctcatttttgtattttttgtagagacgaaattttggtatattgcccaggctggtcttgaattcctgagctcaaacaatccatccatgttggtctcccacagtgctgggattacaggtgtgcgccacctcacctggccataatacaaattcttaaatagtggtagaatatgactttctatatttggttttgaaaaataaattgctttccacatatcagcatggtatttccttctgtgattaaatgtgtgcattgtgagatgtttgctggtctagggtacaagtcttagacatagaagaaatttctctgtaagtagcaaatacttgttatgcccttcttgaaccaagaggatttactaaagaacaaggtataattctatttaaattcagttgaacatcaggaataacttttactgagagactttgaggctgttaaaaaatatgtttatataggctgggtgcgctggctcactcctgtaatcccagcactttggaaggctgagacgagtggatcacttgagatcaggagttcgagactagcctgaccaacatggtgaaatcccatatttactaaaattacaaaaattagccaggcatggtggcaggcacctataattccagctactagggaggctgaggcaggagaatcgtttgaacctgggaagtggaggttgcagtgagccgatatcacaccactgcactccagcctgggcaagagagtgagactgtcttaaaaagaaaaaaatgtgtgtgtgtgtgcatgtatgtgtaatttcctgtcagattgtagattaaagaagagctgtgctttttgaaaggatagaggagacgggccaggtgcagtggctcatgtctgtaatctctccgagagggaggctgaggctggcggatccctgaggtcaggagttcgagaccaccctggccaacatggtgaaaccctgtctctactaaaaatacaaaaattagctgggcatggtggtgcatgcgtgtaatcccagctacacgggaggctgagtcaggagaatcgcttgaacctgggaggcggaggttgcagtgagccgagatcgtgccacttgcactccagcctgggcaacagagcaagactccatctcagaaaaaaaaatatatatagagaggagaagttctagtatgatatttctgctctacattggagaaggagaacttagttagaaacaaaaggtgtgttcgttgtatttgtcatgacttccaaaatgggagcaggtgggccaattcctgggtccttagaaaagaagacccagagacaggagattgtctgcctgcactgtatgggttatggtatcaatataagttgtatagcttgttggctttcagtattaggagtaggaaattgttttaaaatgcatttcacattatatctaattaaaaacacatcttttttattgttaatttcttacatatagctgagaaagcctgtgtactttctgaagtctgggaaagaggtaagaaatgctgctgtggaccataggagttggggtgggggaagaagctaattagaaaaaagtttgtggtcatgatagattttgagtttctctggatgctgttgatgatggcctgagttttagaattcagattcaactaccctttgaatgtgtattgtgtgccaagcactctcattccatttaactttcacaatgttctgtgacaatatttgctccatttaatgagtgaagcatctgaggttaagatatgtatatttttaattgatttattccggggccttacagtttgtagggaataggttccggatgttgatcccaggccctccagacttgaagtaaaggaagaaaatttttgagtacttactatgtcattgtacaatagtaagcaattaatttaaaataagtgttactatatatatttaagatatacaacatgatgttaatatgatacatattataataaaatggttactatagtaaaacaaattaacatctccatctcacatagttactggtcccccaccccaaccaagagcaactgtaatctatttaacattcaacaaaagcctgggtacaatacactattattaactatagtcttcatgttgcatgttagatcttttgacatgtttatcccaggtatttgctgcttcctatgctttgacctacatctccccatttcctcccctgctcagactctgctaaccagtttattctctatctctgtatatttgacctttttttgaaaaaagatttcacataattgagatcgtgaaatatttttctttctgtgtatagcttatttcagttaatgtccttcagctccatacatatgtgtatacacacacacacacacacacacacacacacacacacacacactgaagtttaaccatttgtccactgatggacacctaggttgtttccatatgttggctgttgtgaataatgctgtagtgaacatgggaatgcaggtatctttacaaagtgatgatttcataacgttttgtgtatacccagaagagtaattactgggtcatacgatagttctatttttagtttctttagagacctccatactgtttccatagtggctgcactaatctccattctcaccaatagtgtacaggggttctcttttctctacacgtttgccaacacttaatctcttatttttttatttttacttttttgataatagctatcctaacaggggtgaggtggtatctcatcgtggttttgatttccatttctctgatgataagtgatgagcaccttttcatatacctgttggccattttttatgtcacctttggggagatgtctgttcacctcctttgcccatttttaaattatatgttttcttactgttgagttgtatgatttctttataaatcttgaatattaaccccttatcagatatatggtttgccaataatcttttcccaatctgtaggttgtctttttattttgttgtttcctttgctgtgcagaaactttttagtttgatgtagtctcatctatttttacatttgtttcctgtgttttggtgtcatgtaagaagtcattgccaaggccaacttcaaggagatttctccttatgttttcttctaggaattgtatgccttcaagtcttatgtttaggtttttatccattttgagttggtttttgtgtctggtgtaagatgagaattcagtttcattattttgcatgtggaaatccatttttcccagcaccatttattagcaccatttattcaagaattgtgttgtcttggtgcctttgttgaaaattagttgactgtctgtgtttggatttgttgctgggctctctattctgttgcactggtctgtgcgtctgtttttatggcagtactaaactattttgattatggttgctttgtaacttaattttaactcaggaagcatgaagcctccaactttttttttcccctcagaattgccttggctgttcagagtctgctgcttccatgtgaattttaggattgctttttctactcttgtgaagaatgccattgggattttgataggaattgcgttgaatctatatgttgctttgggtagtatggtaattttgacaatattcttttgatccatgagcttggaattctttccatttattcgtgtcctcttcattttctttcatcagtagttttcgttttcagtgtacaggtctttcaactttttggttaaatttattcctaagtattctgtttgttgatactaacacaaatggagctgttttcttaatttctttttcagcttggtcattatttgtgtatggaaatgccgtgaattttttatgttgattttatatcctacaacttgacaaaattaatttattagatctaacagtttttcgtgtggtctttggagttttctatatatgggatcatgccatctgcaaatagaggtaattttctgatttggttaactttacttattttttttcctttttcttgtctaaatgctcttgatttagacaagctcttccagcacttctagtactctgttgaatggaagtggtcagagtgggcatctttgccttgtatcaggtcttagaggaaaagttctccgtttctccctgttgattatgttgttagctgtgggtttttcatagatggccttattatgttgaggaacttgccttctatttttaaactgttaaagagtttttatcaagaaagtttaactttgttgaatgctttttctgtcagttgatatgattgtgtcatttttctttcagtctcttaatatatcacattgattcatttgtgtatgttaaaccagctttggatgcccatataaatcccacttgatcatgatgtgtaattttttgatatgttgttgaatttgacttgctaatattttattgaggatttttgtatcatcagtgttcatcagaaatattggcctgtagttttcttttctttttttttttttttgagacggagtctcgctctgtcacccaggctggagtgcaatggcgcggtcttggctcactgcaatctccacctcccgggttcacgccattctcctgcctcagcctcccgagtannnnnnnnnnnnnnnnnnnnnnnnnnnnntcaggaggctgaggcaggagaattgcttgaacctgggaggcggaagttgcagtgagccaaggtcgtgccactgctctccagcctgggtgacagagtggaactccgtccaaaaaaaaaaaaagtttctcatgacccttcttatttcttttctttctttcttttttttttgggacaggtccgcaccctgttacccaagctgcactgtagtggtgcgatgtatgttcactgcagtctcaattcctgggcgcaagtgatcctcctgcttcagcctcctgagtggtactacagatatgtgctacaacgcccagctaatttttgtattttttgtagagacagcgtttcaccatgttgcccaagctggtcttcaactcctgggctcaagtgatctgtccaccttggcctcccatagtgctgggattacagtcgtgagctactgcacctggccaactctttatttctgaggcatctgttgtaatgtctccactttcatttctcattttgtatatttgagacccctctctttttttctgtagtctaagggtttgttgatttcatgttttcaaaaaaccaactctttgttttacggtttttctccatggtttttctattctctattttaagcaacttgtttgtatcttatttaatcttcatcgcagtcttctaaggcaagttgaatttttaaatgaggaaactgaggctttcagagctttacacagccagcaagatgcatagccatactttgaacctgttcttaattgctccactgtatggcctttataatttggaaagatataattggaaagaataagataattgcctgaaattggaagacttaaggttccttagggtaaggcttaggaacttttactttttgtagtgttacttatggaggagaaagtaattgtcagtcatatataagtaaagtttattttattttaaaataaaaattttaagagcaaataccttgcttttaaaactgatctggctagctataaaacagtggctgtaagagatgggtaaaaagtgtagttgaaatccgtattgcaaaatcagttttgagcccgagctcctatccttttctttttttctttgagatgaggtcttgctctcttgcccaggccgaagtgctgtggtgtggttgtggctcactgcagcctaccttctgggctcaggtgatactcttgcctcagcctttcaattagctaggactacaggcccgcaccaccatgccaggctaatttaaaaaaattttttttttgtagaggtggggtctccctatgttgtccaggctgggctcaagcaattcttctgccctgtcctctcagagtacagggattgtagatgtgagccacagagcccagccaggagcaccttatctttaacagatgaaactgaatgttagagaagttaagtaactcttgccaaggtttcataaccaacaggtggtggagcctggattccaacccaggtaatttagtctagagctcttattcttaactactttactgtgctaagagtatgggaatgtacagaaatggagccttgctacttctggtaacttgaaggcacaaattttgagctcagttaacatatagtttgattcaaggcagaacagaagtgttacacttcatctgcctctgtccttattatttcccatggttattggtctcaataatttttgttgttgttttatattattcttgcgctggaaaatcctttgtacttagttatcatttaataaatgatgaatgttgaaaaataagtcagaaatggaaaactttgaaccttaaatatagaaaccaaattgtaatacatagttgacagtcatgttttcctttttaagaagtatttttatagtgtttgaagatagttaattgttattattatttttttgagactgagtcttgctcaggctgaagtgcagtggcacgatctcagctcatggcaacctctgccttttgggttcaaacaattcttctgcctcagcctctcgagtaggtgggattacaggcacgtaccaccatgcccggccaatttttgtgtttttggtagagacagtgttttctaccatggcgaaccacctgttcgccatgttggccagagtggccttgaactcctgacctcacgtgatcctcctgcctcagcctcccaaagtgctgggattacaggcgtaaactaccacgcctggccgaacatagtttaaatattaatagaaaaggttgatttatcgttttcatgagttggagaaaattttctgtgcctctgaattgaacttttcttagttgatgagtgttttaagtgtcagattacagtgaaattctgtgatgatacaaaaattcagatatagtgtaattgactctcatcctctgccatgcctattgcctgcaggtcgggaccaggctgacatttcatttttaatcattgacttaatattcagtaagtaaaactgatatgtgaacttttccctccctttcccttctattctgtagctggaagactaatggaaaaacacagttttctgttaactttgcaataagccctgtgtttcatgtactaatagttggatttttttagacaccacttaaaagagtatatctgggttcttaatgtaatggcagtggtcccaaacccttttgccaccaggactgcttatgtggaagacaatttttccatggagcagggtggatggttttgggatgattcaagtgcatttcatttattgtgcactttattattattacattgtaatatataatgaaataattatacaactcaccatagtgtagaatcagtaggagccctgagcttcttttcctgtgactagacagtcctatctgggggtgctggggagacagtgatagattatcaggcactagattctcataaggaatgcgcacctagatccctcgcatgtgcagtttacaatagagttcacgcttctatgagaatctgatgctgctgctgatctgacaggtggcggagctcaggtggtaatgtgagcagtgaggagccgctgtaaatacggatgaagccttgctcgcttgcctgctgctcacctcctgctgtgcagtctggttcctaataggccacagaaacccctgatgtatagcatttaatatatagaatactcatataaccagaggtacttaattgtcagctcaactatatggaattaagatgggaactagatagtagataaaaatgtgcactaaggaactaaaagagtgatcacagaatctgaagtaaagctgttgttgttgtatttaatctatgtgaaaattctttggccagtgtctcccatggtagttactctaaacgatgttgtgctgtaataagtagtctgtggccaaagttcgggaaatgctgcttatagcatccctcaaagaactgatattctttggatcagactttggcagctctggcttaggtatatttggaccttgcttttatttgagaaggggaggaagcaaacatttaatgaggattgctccactgggtctaagtggtatctccatttcgcagacaaggagtctgagtccctgctggtgggtaaaggacacaaaattaataatgaggcagaactcggaatggatccttaattttgccgattccgaagtttttgcccatttgaactacgttggcactgtgtgattataatgaactgctgtctattagattttactccttaggaacagcaatttggcaatatatacaaggaaaagactaagctgccctacttagggaagaagaaaaggataataaattgactgttcgacacaggttccacgtcattcctttgtatattaatagatgaactctgcgtgtttctatagtgaaatatttcagacaccactgtaaagtgctttttgagtgagatttgataccatctttagatattccatacgttttttttttctgacattgtaggaccattctagtctcatctgtgatcaagtatagtagagcttaggtaagatgctaactttttatagcttcattttccttatctagaagtggtgatagtaactgcctttctgagtgattgtgaagcaggtaattatgcttgtaatatgcttagcacagggtctggcacatagtaatcttaactgctattattattagcagtaataacaatactaaggcttaggttgggttgttacctttctatatcctcttgtatttttttaaaaactgttttatatataggatggttataaggaaagtctcaatgttttttcctttttttttttttttttttttcttttttaggtgaagtcttgctctgtccctgggctggagtgcagtggtgcaatcttggctcactgcaacctccacctcctgggttcaagtgattcttctgcctcagcctccccagtagccgggactacaggcacacaccaccacaaccagctaatttttgtatttttagtatagacagggtttcaccatgttggcaggatggtcttgatctcttgacctcgtgattcacccacctcagcctcccaaagtactgggattacaggcgtgagccactgctcctggccttccccctgtatttatttaaggaaaaatcatcaccagatgcatttttaaagtaatagaaattccatcttaagtatattttatagggcgttaagaaagttggagtcgtcactagggatccggcagtttttaagtgagtattcgtaatcagcaagtgttgacctagcaggtgcctttaaagttttgtttgtgtttaatgtgaaatgtgtattttcaatagatgtgatgtttgtatagttaatgtttttagaatgcattttttttttttttcaaaaactgttttcaggctagtctgtatgcagtggcagtctggtttgtattgaccattacgtattgagtatttaataaaatgttcaaatatgagggacataccatattatggtgagatgtgaagattgtcccccatgcccccaactgggttgtccacagctgtatttagtagagttaacttaaatggtctgagatactcttcaaaaatttgaatagctatttgggaccattcagtaccattaaggctattaactgtaaattgagttaagcagaatactgtatgttttagttttttcttcagtttttattcttctcaattttgaggaagttggggagagaaacttttccccaactctgaaaaattttctcttccttccttgttatttcctgctttgaaatagcccaggtcattgggacctctgagaacatcagataatatttacagcttgaggtagagtgattttcatgggaaactttttctcataaagtaaaatactctttgtgcctgccaggacatttttagaggagcaacaggcagcccctcactactttgtcattaaccagagtaagggaagggaagaatgagtgacagctttcttctttttccttttctgcctcttggctccctttccctttccttcctttcctgttacccttacatctctgtgggttctgaatttggatttcagtagaatggcgtaatttttattatactttttagggaaacttgtgctcccagagggtgaatacttttttccattttggggttttaatttttacatcaattttaaattattaagaagttttcaattatataaaactagatagactagtttaataaaccactgtatctccatcacctatttctataattacatggtcaatcatattttatctatacccttactactaaccccaatttattattattattgttattatttattttttgagacagggtctcgctctgtcacccaggctggagtgcagtggcatgatctcggctcactgcaacccccacctcccggattcaagcgattctcctgcctcagcctcccgagtagctgggattacaagtgtgcgctaacacgctggctaatttttggatttttagtagggatggggtttcaccatgttggccaggcgggtcttgaactcctgacctcaagtgatctgccctccttggcctcccagagtgctgggaatacaggcacgagctacctaccgctcctggcctcccaatttttttttttcccccgaggcggagtctcactctgtcgcccaggctggagcgtagtggtgtgatctcggctcactgcaacctctgcctccccgggttcaaggtatcctcctgcctcagcctctgagtagctgggattacaggcgcatgctactacacctggctaatttttgtattttttttttttttttgtattcttgtattttgtattttgtgtttttagtagagacgaagtttcaccatgttggtcaggctggtctcgaacacctgacctcgagatccacctgcctcggcctcccaaagtgctgagattgtaggcttgagccaccgtgcctggtcccaaatattttaaaagcaaatttcagacatcatatgatgtttttggaaagtactatttgtttctaaaacatgaggatgcataagacaaagaaatagaagtacagcaccatgatttcaccttttaaaaattaaagaattctgtaatatcagatccagtcagtgttcacatttgtgtgattgtatcttttttccccttaaaaacatggtttgttttttacttgggattcaaaacaaggtccgtagcatttggttgctatttttaactttcctttcaattggtaatattttttctttaactcttttccttgccatttatttattgaggaaatcagatcatttgttttttggaatttcccacattcagggttttgctgattgcatctctgtggttatataacaagctcctttatttcttatattttctgcaaatggttggttagactttttagtcatactgctttattgcatggtactgaatacaggtgatccccaattcgtgaaggttcaacttatgattttttgactttatgatactgcaaaagtgatatgtattcagtagaagctgtactttgaaatttgatgcaaaattctttatgataacttcgttacagaattttatgttaggtctttgtgttaggtgattttgcccaactataggctaaattaagtgttggatcatgtttaaggtaggctaggctaaactatgatgtttggtattttaggtgtatcaggtacattttcaacttacagtatttccagtttacaatggatttactggatgtactccattgtatgtcaaggagcatctgtatttcctattgcataacatcaggtgtcatgtgatgtctagttccctctcttttttttgtgatgttacagttgattactgcatctgttcttttgaagtgatcctttatgtgttacaaagttccccatcagtctttcacctattctctgtaacagtcatttatgatgattgtctagaaaagcttgtccaattcccaggccacatgtggcccaggacaactttgaatgtggcccaacacaaatttgtaaactttcttaaaacatgagattttttacaatttttttttcttatcaactatcattagtatttatgtatttgtgtggcccaagactatacttgttccagtgtcacccaaggaacccaaaagaatggacaccactggtctagatcaaggtttctgcaaactacagcttataggccaaatacgatccactgcttatgttgtaaataaagtttttttaggatgtagccacacttgttcctttatgtattatctatagctgattttcagatacaatgacagagttaagtagttaagacagactgtgtgtcctgcaaagcctgaaatgtttactatctggccctttatggaaagtgtgctgaccccaatctagatcattatttcattagagatagccagtggtgatattctatcattcattttgtattttgtagctggaatttttctgtgaagaagaatttacctcaatttttttattatcctgagaaaaagcagaataagtcttgattctttagcatttgacagagtgaggtgttttcttttttttaaagtacgtatttatatgaacccccagttttgagtatgtttgatgttttaatctgtcacattctctttaattgtcaaattgttccatttttgccaatgtgagccccatcctgttggcgttttatctttccatataacctcagtagtctttggtaattctgttttcgagtatgacaagatgttccaggctcatcttgtacatcatctgtcttagatatctagaaccactcattactctaatgggttctgattccttttagtggggaatagtatttagagaccacagtttgagtgtttgttgctctgggttggtggttgtttttaggatcttttagtggacagagctagggtgtggttatatgtctgtgtgattttttttttttttttttagatggaatctagctctgtcgcccaggctggagtgcagtggcgcaatctcagctcactgcaagctccgtctcccgggttcacgccattctcctgcctcagcctcccaagtagctgggaccacaggcgcctgccaccacgcctggctgatttttttgtctttaagtagagacgaggtttcaccgtattagccaggatggtctcgatctcgtgacctcgtgatctgcctgcctcggcctcccaaagtgctgggattacaggcgtgagccaccatgcctggcagtctgtgtgattttttaaaaaattgtgttaaaatgcatatagcattgaattgactatttgaatgattttaaagtgtacaatcgttaatattaagtgcgtttaccatgttgtgcatctatcaccaatttgttcaagagcttttccctatcctgcaaggaaaccctatattctttaagtagttactccccatttccccctgccccagacctggcattaatttgctttccaactctatgtatttgcttgttctggacatttgatataaatggaatcatactttatgtgaccttttgtgtttgacttttttccacttagaataatgttttcaaggtttatccctgtttagcatgtataaataattcattcctgttcatggctgaataatattccattgtgtgcatatactacattttgtttattcagttgatggacgtttggattgtttatggcttttggctattgtgaatagtgttgctgtgaacatttgtgtacaagtttttgaacacctgtcatttcttttctaggtctatacctgataatgaaattgcagggtcatatggtatttctatgtttaatttactggggaactgccaaactgttttctataatggctgcaccatttcacatttcctctagcagtgtagtaggattcctctttctatacatcttctttaagccttatttctattttttaattattgctatcctggtgggtatgaactgttatttcatggtggttttgatttgcatttccttaatgactattgatgtagagcatctttttaggtgcaaaccaccattgttggtggtttgtgtatcttctttggagaaacgtttatgtaagttctttatcttttaaaaattggattgtctttttgttattcagttttaagtgttctttatatattcttgatgcttcaccctgtcagatattataacttctccattctgtgggttttttcattctctttttagtgccctttgatgcacaaaagttttaaatttaggtgaagttgaatgttcctgtttttttctcttcttgcttgtgcttttggtatcatatctgaaaagagcattgtcaagtctaaggtcatgatttacccatatgttttcttctaaggggtttgtagtcttatttcgtatatttaggtctctgatccattttgagttaattttagtatatggagtaaggtaagagtcttgttgtacaaactccatttgttgaagagtttattttttttccccgttgtgtggtgttggcactcttattacgcatcagttgaccatagatacatgggtttatttttggatgcacagttcttattccattgatctatatgtctgtctttatgccagtaccacactgtcttgataactgtagctttgtcataaattttgaaatcagtaagtcccccaactttgttccttttcaagattgctttaggtatttagggttccttacaatttcatatatattttaggattgcctttttcttttctgcagaaaaggcctttgggattttggtagggattgagttgaatctatatatcagtttggatattgacatcttgacatgtctttgtatccttgaatacaggatttcttttcatttatttaggttttctttaattttctttagcaatgttttgtagttttcaagtcttgtacatcttcagttaaatttattcgtagtgtttttttatttttctttttggatactgctgtaacttgaattgcttattagtatccttttcagattgtttattgttagtgtataaaaattctgatttttatgtgttggtcttacattctgcaactttgctaaattttggaattttttaaaatgagaaaacacactgtgattcatatgaatacttccaaatccgattttgtttcaagattaagggtttagggttataaggttttctctttcttagctttatacttttttctcttatgctggaaattttgagaataacgaattgctttattatttatatttatacatatgtatattagtatttctgaagttattgtgaaaaatgattattgtaaaacaatttaataattctttgcaattagtataatagggaggtacagttaagttgctttttaatcaattaattatttatttaatttttttgggacagactctcactctgttgcccaggctggagtgcagtggcacaatagtggctcactgtgacctctgtctcctgggttcaagcaattcttatgcctcagccttgcgagtagctgtgattacagacgtgcaccaccatgcccagctaatttttgtatttttggtagagatggggtttcgccgtgttgaccaggctggtctcagactcctgaggtcaagtgatctgcctgccttggcttcccaaagtgctgtgattttttttttttttttttgagacagagtctcactctgtcgcccagactggagtgcagtggtgcgatcttggctcactacaacctctgcctcccgggttcaagtgattctcctgtctcaccctcccaagtagctggtattaacaggcacccgccaccgcaccctgctaattttttgtatttttagtagagaaggggttttaccatgttggccaggctggtcttgacctcctgacctcaggtgatctgcccaccctggcttcccaaagtgctgggattacaagcgtgagccatctcgcccggccagcactctaacatttttattcaaacagttccatattgatggacattagggtattgcatagcgaaattttgatgggaccagatacttggttcttgtggcacttaaactttaaaatattttattttcatttttatcataaagatgttttaccacagatactcaaaacagtatagaagtgcacataataaaaagtttaaattgttctctgattcctgtctgcccacttttcctctattcctatctccagaagttactactagttagtacaagacttttcattaaaggcgtatacagcatttatacactgtgaatgctttttaaacaaaattgagatcatattatgaatattctgcaacttaatattttaaacatagcattattagttgagcttttaagtttggctaatgagaaaagattcctgaatataaataagattttaaaaaatgattttgagcctttttttctgtgtcattaatactacatatatattttgtgcatgtttgtgtgtatgtatgtgtgcttcctaaatcttacagtattgtaatctgcattaaagtccagaaagtagtgtatatattcctctttactttctctgtaggctcaaagttatgtttggaaagaaattgagaaaacttttattgttgtaattgattatggtttaatactaaaagtaaatccagataaagttgagatgcctattaaccaacagagttgaatgtaagttccataaaagcagggaaaaacctgatctttttcatcactgggtccctagcacctaggacagcgactacctcctcattcttcccattctttgtatttgttttatgttttactatataaattatgactggatcataccactcaaactgttctgagtacttttttcacttgtcagtatatcataggtatgttttcatgtcaatacttaagtatctgttcttttaaatgagtctattaatggtgatactatagattacataattaggcagttttaagacttttaatttgaactccttttttccccttagactttggcattaatgttttgtctttaaatatcagtgggagatactaagttgagagttatggtagatggagtgagagtgtataacttgctgtatatttttgaagcaaacatgtattgaatggtggtacatgtaacatgctttaaacaagtttaatatgtgatttttctgactgaatattggagtagttcactttaaaatatttttggcaaggaattcacatgaagaggaatacaaagagtcaacatgtaaaagaatgtttaatttagtatagttaaagaaacaaaaataaaatgagataaaattatactctttgacccccaaattgttaaaaattagaaatacaatactcagttactaacaagggtttcaggaggtgtgttgctgaaggataataaattcatatattgccggaaatggtgacttatgcctgtaatcccaacagtttgggaggccaaggcgggtggatcacctaaggttgggagttcgagaccagcctgaccaaggtggagaagccctgtctctactaaaagtacaaaattagctgggtgtggtggcacatgcctgtaatcccagctactcaggaggctgaggcagcacaattgcttgaacccaggacccagtgagccgagattgcgccattgtactctagcctgggcaacaagagcaaaactgtcttaaataaataaataaagtaataaatcatatattctttctggagagcagtttggaagagtttcagaaattctacttgtaggactttaaaataaattaaggatatgcccacaaacttagatatacatgactgtttatgaaaaatgtaatcctggaactaataacaataatagtgtctaaatagtgtttcttttgtgccagagattacatttgtttaatcttcttaacaatcctatggtatttacacagtaagattataagtgatgatgatgtagaatattttacattgaaataaattgataatagtgaaaatagcacatttcaaaggagtatgtgcagtgtattttcagaaactgcaacagaatctagagaataatttgtgagaatatgctccagaatatttagtaaattataatcctgttattcaaatatattttctttttgctatctttattttctaatttttctacagtaacagtattgtttaacaagaaacctgttgttttttaaaatatcctctgattttataaaataatttatttctagatgcctataaacagtaaattcctcaagcatctttaaaatagagatttaaattgttactaatggaattctaagcaacaaatggaattcgaagcacacaaaatggggaattgaaatatccttgaacagcctttgatttctgacaatttgatggtgtttttttggtgatagaaatggaaagagtagaaagtgaaggctaagcatctaaagtttgaagcctgacaacagaaaagtgacaaaatcttttaaatgtttatttgtggttgctggcaatgaagcattaccataaataaattaaataaattaaataaataaataaataaataaataaataaatggacagattgactgacttgctacattttcagggtgttgcagtcgggtattttctttttcccagttgaaacttagtaactcatatttattgtttaaccttcctaagaattggtttctttcaaatcatcggagtctttctgtcccaagattttctttttctattttttttgaagccgggtctcgcgctgtcacccaggctggagtgaagtggggcagtcaaggcccactgcattctagacttcccaggcccaagcagtccttctgcctcagccttccaagtagctgagaccaccggtgtgtgccaccatgcctggctaattttttaatttttgtagagacgggatccccctgtgttgcccaggtttttcttgacttcctgggctcacgtgattctcccgcctctgctccctaagtgctgggattacaggggtgagccactgtccctggccaagactttctgtcttgctcctacccttttcaagaattgaaaaaattcgttcccagattgctattaatgtatctggtctatctaggtctgatacctgtgttagtttaatgtagtattgcctttaagaccttgttaaaatgtttttcttaggccttcttttacaccttttttaaaaaatcggcagctgttctccttgaccctgcattttccatttcccttctgtgctatatttttccttctaacacttatcactttataatgtataatagatgttgtttatctgtgtctattcttctcccctccctctttccacttttgagatataagcaccattaatgcaggaagttttgtttctgtgtagttcattgtgtattcccagagttcagggtaatgcctggcatataacaagatttcagtaaattttttttttgaataaatgaatagtgggcactcagtatttgtggaatgattggatgttctatttggttgatgaaagtgaaatttattctaagtgtttacagaagaaggttagggttctctagctgtttcgtagtatggctatttcattgtagctctagtaatagagttaaatttataggcaggttggaatttcagaactttgccctggtacgtggtaggtgcttattaaatattgctaaatgacctagcttgctgtgagattctggcctaattggcatagccttttgggtgagggagttggactacgatttcagagctctcttgctttctcactgactttaagattcacctccagggactttgtaagtatattcctttggaattcaggagttataaaaaagtgaactggatgaaacttgctataggattacctttttggaatcaaaacagttgttgaatgttaattagcaccacagctttgtgtgaagacttttagacttgagtaataatgagactcattattaaggagacagtgtgtgttaggtgttccaaggcttccacttttattcatccagcacttaaagccgactatatgctaggccttctgctagagtcctaaagatacaaaagtcaaatagggcagtaatgaagagaagaagataaaaatgtttgttccagagtgctgctttttgaggtctggggtttcccaaaaggcaggggaatttattttattgagtattttttgttttgatttaatttaaattaaaagtgaatatgagccattaactactgataatatgtttaaacagaacataatttaatatcagtttgctcttgagtcagtatgtatgtatgtcttttttaaggaattagcatttattgagtattatatcttacactcttgacacattctttttttttttttttgagacagaatcttgctctgccactcaggctggagtgcaggggtgtgatcttgactcactgcaacctctgcttcctgggttcaaacaattctgcctcagcctcccgagtagctggcactacaggcgcatgctgccatgcctggctaatttttgtatttttagtagagacagggttttgctgtgttgcccagtctgctcttgaactcctgagctcaggtaatctgcccgccttggcctcccaaaagtgctaggattataggcatgagccaccatgcccagctgcattattcttttaacatagtcctcataataatcctgagggagaggcattattacctgtattttacaaataagaaaattgagtttagagaagttaagtaatttgtttaaggtttacagctttgtaagttgtggatttcaagccaggctttttttgatactaaagtacattaacagcaagacatgctaaagattactgcatcttgagacgtaagaatttctgtatatttactctcaggagactctataactccaccatccaagattagcaactaattgccactagtgacatgtggctattaagcccctgaaggttggctagtccaaattgagactggctgtaagaataaaatacacaacagatttggaatatttagtttggagcggaaaaactcagtaagttttgtattgattactgaaatgatatgatttatatttttacatagtagttaaataaaatatatcaacaacataaaaaagtacattaactttgtgatgcttctcaaaggaagttgttgcagtttttttttctttgtttataatgttaaataacaagatgtattgaatttgaaaactgtactgtaactgttccccccaaattgaatctttgactttttaaccagagtatttaaaagtaccttttttcttactaaataaaatatttttattgtagcaagaaatacaagagtggtggaaaagaataaagagaaagaagaaaagatagctgggatagggagagagagattttgactgatcccctgttaatcctttgatgtacaggtggtatttaacataatacagtttgggcttccgactctctgagaactggagtcaaatctgggctccactatttaatgggttaatgatttggtgttttcatgtttttggggtaagttacttactccggttttgcagatgagagaactgagatttagagatgtcagcctgtgtcatagggttttgaaaattaaatgtgacaaggcatgtaaaatgcttggaacatacttaaaattcttaggcacatcctagttctttgcacatagctatattattttttcataaaatgagtcaacaaaaattataactgcttattttgaacttttaatatatatctatccacagaaatcaaaacatttaaaattatcagatgataactaatacacacaatggaatgctataatatattcaatatgctcttctagctagacatttaattttcagttttcttttttgcagttaatgaaatgcataggtgaatattttcgtagcagaactttacctgtattcttatctgattagggtagagttggttggttgaggagtatgtgtactttaaagatttttgacccattttgctgaattgccttctagaagttcctagtcatattactaggatttacatgtaatcctagaatttatctggccacctgtttttctacattcttactaaattagatattataattttaaaaagttattgttgatttaaccacttttaatttttacattgctttgattgctaataagtttgaaggttctttttctttttctctttttttttttttttttgggacggagtcttgctttgtcctccaggatggagtgcagtggcaccatctcggctcactgcaagctccgccttccgggttcacgccattctcctgcctcagcctcccgagtagctgggactacccaccactgcgcccggctaatttttttgtatttttagtagagacggggtttctccgtgttagccaggatggtgtcgatctcctgacctcgtgatccgctggcctcgtcctcccaaagtgctgggattacaggcgtgagccaccacacccgaccttcttttttttttttgagacagaaacttgctctgttgcccaggctggagtgcagtggcgccatcttggctcaccgcaacctctgcctcctgggttcaagcaattctcatgcttcagcctcccgagtagctgggaccacaggcatgagctacctcgcactgctaatttttatatttttttagtagagactgggttttgccatgatgtccaggctggtcttgagctcctggcctcaagttacccacttgcctcggcctcccaaagtgctaggattacaggcatgagccactgtgcccagcccctgaaggttatttttctacgggtatattggccccttgtgtattatgctgttttcccattagtgtttcatgtcctcattcccattttgggggtatttgtcactcttctggctttgtggtcatgctcagagaaacttgctcttccttaaactataaattggcagtttttaaacttcttgctctcaggactcctttgaactcttaaaaaactattgagaatctctgccaggcacagtgtctcatgcctgtaattccagcactttgggaggccaaggtggggggatcacttgaggtcaggagttcgagaccagcctggccaacatggtgaaaccctgtctttactaaaaatacaaaaattagctgggcatgctggtgcacgcctgtaatcccagctacatgggaggctgaggcaggagaatcacttgaacctgggaggtggaggttgcagtgatccgagattgcactagtgcaactctagcctggacgacagattgagactccgtctcaaaaagccaaactattgagaacctcaaagacttttgtttacaccgtctcaaaaaaacaaaacaattgagaacctcaaagacatctgtagatctttgccatcttagaaatcaaaagagacatttaaaaaaatactttgttaagatatggtaaaccatttacatgttaacatttttaatgaaaagtatattttccaaaataaaaattaccaataaatttttcatttttgccagtctcttgcttaataaaaggtatctggattctgtatatgcctctgcatttaatctgttgcaatatcacacaatgtgtaccgtctggaaaagttgattgtataatcaggagagaatgggagttaaaaaggcaaattatattattatgaaaatggttttgactttgtgggcttatgaatgggttgaaagatcccaagactacaatttgagaaccactgatataaataatcactcatatattttccttttgtgtttttatggctgaatttaaattcagaataaattctagtataaattttctaatttctcccctctcctgcccaccctctccaattggctaatatcctttgtggaaagatccattttcatgtaaataattgaatgactaggataaaacagtagacatatctgctttttccgagttgttactgagaagctaactgttcattgaaaacagtagtcttggcagtcttaccttaatgttgtatctctattttggtatattcccttattttcttgatgggttctccccccgccccgactgtaactcccagttttacaacaaattgccctaaaatcttaaagattttttgttcatactgattgtagcgttttgctctaaatattgcttcctccctgatttagaaagtgatttaaaatgtacatagaagcataaaccataaaagaatattttgtcactttgaatatgaaaagtgatattgatatactattattgctgtactatgatggagtatatcacaggttatggaggttatttcaatattgaaaaaatgctagttgactatacataaattcctgcaccattgttaataaattgtattctttttgatatgttacttagcttcttgggaccctttactcactagacttttattgacagctgtgtgtgttccaaaatagagttagataaaaagaacaagacacattttttttctaactttgcaggttgatagagaaatacacatgttctgtgataagtattatagccacaaacaagaatattatgggagggcctaggcaagatattgttaagaagtgatggaggaatgaaggaaagggaattgatttgacaagattaaggttgtacaatcttccttcagtagttgatgatttctttaggtttctgagtccaaaggagagaggaggaggagtcaagaaagactccccgctatttgtcttggaagaccagatggataccagtgtttatcaaaatgtggaataaaccctactttcaacaaaacaaaactccttacacatactacactttccaagatgctgtgttgttttccaagatgaattcaattgtgggcatgttagtttgagggacctagggtggagatttgtggaagccatttggagagctatcaggagacttgtatgagctgatgagcagtgtagcataagtaggtgaatggaatgcttaagatcatcctttgagaatttttagcaggataagagaagatggtcggagaccctctgataattgagggacaggcagagaaaaataaattcagcaaaacataatcagaaaagaaaaacagaagggtcaggttgtgttggaggccagtgaccagtttaaagaaagaagaagggtaggggagagagggatctgaaatgttaagtgctgcctaaaggacaaataaaatctgaaaagtgtttattagatttaggaataagaagccattgatgactttggaaaaagcaactaaactgggaagttgggtatagaagctggagaagtaggggatatagaggtgaggaagtggaagatggtgaatattgactactgtttgagaagtttgcctatgaagctggttgggtacaggttaaaagtgagcaagcagggatttgaaaatgttaatgttctagggaaggagagagagaggagggaatgagagattgaactaagaggataaaataccattatcttgaactttctagagaaatgttttttatgctttttgtttgctctttttgtgaaaattgttctaaggtatttttagataaagctgagtatcttttttgatacctttatgatatttcagctaccatgaatatcagttattgtactaccctattgaagaatatattaatagcaacagccccattctaaaatacaacagtttagggctgtattagttcgttttcatgttgctgataaagacatacgcgagactgggtactttatacaggaaagaggtgtaatggactcacagttcacgtggctggaaggcctcgcaatcatggtggatggcaaggaggagcgagtcacatcttacatggatgacagcaggcaaaaagagagcttgtgcagggaaactcctccttataaaaccatcagatcttgtgagacttactcactataacgaggacagtacggggaagatgtgccgcatgagtcaacgtgggtccctcccacaactcgtaggaattttggcagctacaattcaagatgagatttgggtgggacacagccaaaccattcaggggccatttaatataattatatagtagctttttaatagccagttttatcttttccttgtgtatgcacatgtgttttgcccgttaactcattgatgtggttggtcctagcagtagtagtccctgttactacaaatgtgctaagtaactgtgactgggaaatccacgttaccaaattgttagaattgttctttgaatgaaattactgacagtattttaatcagtagattgaaggtctggggattacatctataaagtgtactctgtgatatatgtagttttctttttcttttctttcttttttttgtttttttgagctagtgtctcactctgtcacccaggctggagtgtagtggcacgatctgggctcactgcaacctccgccgcctgggttcaagtgattctcctgcctcagcctcctgagtagctgggattacaggctcccaccaccatgcctggctaatttttgtatttttagtagagaagaggtttcaccatgttggccaggctggtctcgaactcctgacctcaggtgatccacctgcctcggcctcccaaagtgctgcgattacagacgtgagccaccgtgcctggcctatagttttctactgcggttttacttataatgtagagctctatagtagagctctgtagttagactgctttagaatcccagctctaacacgaaccttgaagaaatgacttacctaaaagctttcttcatctttaagttggcgataataatagtacctatctcacatggctaaatgatgtaatgcatgaaaaacacagcttggtacaaactaggtacttattcagtaaacattagctataataattattttctccctgcctccaggattttgattttctaaacttgatgtttttggaagtcttcttgattagaaagatgttactatatttgaaaaggaaatagattcaagtagagtcatgttgcagattttatgtgtccgagagggcaatgagagtttgcagcatatataaacaagtagatttatttttctgaggtaggttcgtggattgttaacagtggtttagagaaggttaatgtgtttaaaaatgagaggtaaaaaataacctagaattaccatatggggtattttacttgtagggggtaggggttgctgtagactagctattttaggacaggaaattaacataacctggtgaggctcatgaatctttcaggcttagtatcagaactactgggtaacctgtaatttaacccatggcagtactttgagggcaggaagttgggggtttgtgcctggtctgagaaagcctatattcattcacctttttatgagacttgtgctcttaaaagacagagaatgaaattatttaagacatttgataaccatcaatttagtcattattttcttccttctatcaaataaattgtactattttgttaaacattttagagccctgttgaaaatttgtgccttttttatatagtaaaacatcaatggatggaaaatcctgttttctagggtagccctctttattgaacttctctaacacccacagatcccctttataaagaagaggcacatttagtatgtttaaaaatagtaaactctttctttctgtgaatttctcaggttttgttaatggtgtttaaagtttaatgctgctaaacccacacaggaattttcactggttttaaatgccacaaaaacagtttttacttttattgatagctggtttagtaaaaagaccttgttgttcaattcaggaatgatttaacaaattattaaaggtttcattgctttttttcaaaagtacttactatttgcaagtctcttcatatctgcagtcataccaaattactcatatctttttttttctttttttttgagatagagtctcactctgttgcccaggctggagtgcagtggcatgatctcagctcactgtgacctccgactcttgggttcaagtgattctcgtgcctcagcctcctgagtagctgggattacagatgcccaccaccacgcctggctaatttttgtatttttagtagagacggggttttgccatgttggccaggctggtctcaaagccctgacctcaggtgatccacccgcctcggtcttccaaagtgctgggattgcaggtgtgagccactgtgcctgacccagtatagtgctttttataattaattgtatactttaaaaaaaacctttattcatgataaagtaaatccagtctactgagtggctgtgctatatctttaacacctattttatgtttatttccttcagcgttacagcttccctacatattacaggttatgttacctaattaaacagttgggctatgtcccattctagttaagaaaactgtcctgttgcctattttcatctgattacaattttctgactttctttcaatatctgtttttttgtaaaccagcctattcagttttatgtcccaatgtcctgttctcttgcttgcccactgatttttctccatcatttaaaaaaaaaaaagggaaattgatagacagcatctagagtgtcctagatcctactagacctggtgtttggcccactaatttcttctcacaacgattgtatactgtagtttaatttagctacagtgacccttaacacttcactcaaacgactcttctgcctcacaggttgtttcctcagtcttgcctgcagagcacttctctacctctctagccacctacccctgtttaagtgttcatgttttgacctcagccctttgttcttactctgcctaccttccttctaccccagtgatctggtttatgaaaaaccagatattaataccactgctttgaccagatctagtcctctaacccagatcttttcagaatcctagacctgcaggaattaccacctacatgttccacagctactttaaactgaacatgttaaaactgaactcattttctctcctcacctctctcctcccctaaacaaaataaaacctctgtattcttcttcttctctatcttggtaaatggcaccattatccatagacgtccctggcttccatcccaggagccaaagttgtttcctccttacacctagttctccacctgtagtcattcttcaggtctactccctaagtatctttggaacctattcctcttcatttactagagccttcactttattttgggtccttaccactctgcctagaccagaggttcgcaaactagagcccataaagccgaatacggctagctgtctgtctttgtaaatcaaatattgttagaatgcaacttctgtggtttagatatggtttgtttgtccccattaaaacttgttttgataatcagtgtggcagtgttaagagatgaggcctggtgggagatgttttgtttcatggggggtgggtccctcatgaatggctttgtgcctttttgtagtggtgagtgagttcttgctctggtggtactagattagttctcatgggaatgggttagttctgagataatggattgttacaaagccacgatgcccccagatttttcctcttcacatttgaccacttcccctttgagctgctttgtcattttatgatgcagcatgaaagccctcaccagaagccagggccatgcccttaaatttcctagcctgtagaactgtgaggtaaataaacctcttctttataaattacccagtctcgtgtattctgtcatagccccacaaaatggattaaggcagctgccttgctcatttgtttacgtattgtccactactgtttttgtgctacgaaggcagaattttgtagttgtgacacagactgtgtggcctgcaaagcctgaaatgtttactgcctggccttttacagaagaggttcgcctacccttaggctgttactgattttctgtctccagccttgtctattcttctgtcctaccccaggtaaacattcagaagtctgatcatatatccccccatatgaatcttttatttactactcattccttacagaataaagtttaagtcgcttatcatggtgtaagatctctggctacctttctggtttatcttctgttcagaaggcatattgatttgtctctggtatatgcttttgcctctgccttaaatgttctctcctctttttggtcaacttacctgtctctcaacatccagcacagatgttaccttcctaggaagtcttctgacattccagatttttctttttcttgcttccttcatacactctacagcttttgttgtatttaacattgtgcagcttttatccgtttgaccatattcgctttgtaaattttaaagccacctaggccaggcctggagccacattcactgactactccttcaagaagagtttgttgactgaataaatggatttcttttgtgttagattcttcctgattagtcagtcagagcaaggattatgtctcgtacaatttttgcattctctgattgtatctagggacatgctagattcatagtaggtacagatattgactaaattgttgatttgaattgtcatgtagataaagtgaagagaaagagattccttttggaggggttggacattcatcaaattgagactgtctaaacccattaaaaaggagctagatttgccttaactactaactttttcccttgacatatataggcattttttcccttttctgtacttgggaatttgactgactttcattgaatgttttgtgtcattcgttaggcatcatatgacctgttttatataatgtaagtataagtaacaatttagatggaatgtgctaagttgatgcattaatgtaaaacagagtcatactaaaagtactgttagtctgggtataaatggaatatgttaagcctgctaaaagcggaaatggagtgttaccaatgacattagctgttaggatccataccttttcttaactggattaatttgcctgttagttgtacataggtgccaattcttgtagggttcctagtagcaggagtagcagcagtaataaacacctgtctagtgcattttttatgtgccaactactgttttaagcgcagtacataaattaactcatgtagtcttcataacaaccctatgagataagattctattgtccctgcttaacagatgaggagcctgaggcacagggaactgaaataaataaacttggctaaagtaatacagttagtaagtggcaaagccagtatttaacccagcctgtctggctccagagtttatgctcttagtgactatgctagactgtgtatgggttgtggaacaatttgaatgcacagttcttgcattccttttgttcccctctaacagaaactctggagttttggaacagaggaggaaatgaggaaacactaaatggttaaaggtaggtttatttttaaaaggcatttatatcacattttatatttattatgattagttgtaggactcctttttagcatcattctgtttttatcttttcctgtaagttgagataagagtttggttttcttttgtttaacttgtctgtatccagttggtgcttactaaatgattggctttaatggttctagacattgtaattttatttagctgtgaagatacatagttcatacatttggaagtatattaacaattgtggtaatcaagagaaaattatcattagagctggacaacattgatattccaggtgttgcttttagcaggcttagaaaacacttgcaggtagaacataaacagcagattgcataaagcctaagtgtactgctcagtgaatacaacacccagatcaagttaagtatagaacatcttcatcattattccaaaaggctctcaggtgtcctttctcagtcaataaataccctaccagctatgttgctttgtttttaaaagattgtatttattaccatttgacatattagtttgtcttccctactggagtgtaaacttggttttgttcatcatgctgttccattgctcagcatagcgcttgacatacagtaaatgttccacaactatttgttgaataaattaattggaaaacacttgattatttcttatgtaccatattctacagcacgcaggtgctattttatgtactagttgcttgaggatagatcataaatcttggttttctagaatgaggcttttgacatttagtgtgatacactacttttaagacaaggaaattgacttctgctggtattgggtttattgtgtgttgatctttggttacgtgaatgttagggagtatgagaaagttgctaccagtgagagagaatggtagcctgtctatctggattgccttcttgagagtatctgattccttatagttatctcagattcttaacttacactcttgatgatctttttgaatacctcaaacagttgcaaaagactaaatgctcttgatcttgtggagagagagttgtgataggaaagatattatttaaccattaatttacttataagacagtttggttatcaccttagttgaaaataatggaaattctctttgcctatattgaaaaggtttaagataaataaaggagtctgtgctttagaattcattttagttcaaacttaggttcatgtagaaaagaaaataaattttgagctgaaagtgactctagtattctgattcatgttcctgtctgtcacatttaactctctcattttacatttgaggaaactggagcacaaagaagtaatgtgatggtgtagtctaaaattaaaagtttaggccaggagcagtggctcacacctgtaatcccagcactttgggaggccaaggcaggcagatcacttgaggttaggagttcgagaacagcctggccaacaaagtgaaaccctgtctctactaaatatacaaaaaaaattagctgagcatggtggtgcatgcctgtagtcccagctactcgggtggctgagacatgagaattgcttgaacccaacaggtagaggttgcagtgagccaagattgtaccactgcactccagcctaggcagacagagtgagactctgtctcagaataaataaataaattaattaattaattaaatttaaattttaataatgaataaactttccaagtgatacatactctagtggcttagaaccattgtgctgtcatgcctttttctttctttctttttaagagcagttttaggtttacataataagtgaacagaaagtagagtatgcctatataatcccttacccccacccatatttcccctgttactaacatcttgcattggtgtggtacatttttcctggttactaacatcttgcaatgctatggtacatttcttacaattgatgaactaatattgatactaaattattaactaaagtatataatttgccttttagaatttccattagggcccacactttttattgtatagttctgtgggtattgacaaatgcataatgtcatgtatccgtgattactatcatgcagaatagttttactgcccccagaatcccatcatctacctatttagccaccctctcctcccatcccgtggccaccactgaactttttactgtctcttgttttgtctttttcagaatgtcctatagttggaatcatacagtatgtagcctttttagatgtggttctttcacttagccatatatttaacattccttcatgtctttttctggctggatacctcatttctttttttccctgaataatacctcattgtatggatgtaccacagtttttttagctgcttacctattgaaagacatcttggttgcctccacttttgggcaaatatgagtaaaactactgtccacatttgcgttcacttttttgtgtagacatgttggaaataaatgcttggtgccgtaaagtgaaaccagtactcaggcagaagtttttttagcaaggcaatttatttttgcagaagggtgggtctcacggatggagcaatggcaagagcacagggaacaaaggagagaagaggtttttatttctaatatgtagtccctacctcagtgtcactcccctgtgggctggggttggaccgcagaatttaagctgacttgattggctacttgtgaatattttttttttgtaaataaggaagggggaaggggaaggtgagttacagtggtgggacatgtggtttcgaagggtggatgtgccgtttcagaaaggtggaatgggtgcagagtgggtaaccaagggaacagatgtgaattattgattagagctgacggtaaggttgtttatagtaactagaggcaaggaggcgtggagaacaagaaagttgagtttgagatcaaagaacaaggaagttaacaggtgaagctttgaagagaaattcagagaaattcattatatcttattccctgcttttaatttttataatcttttctctttaaacctttttaacacgtcttggctttgctgttcgacttgatcctttaaaaggaaaagcttatttgcgtaaggtggaggagagctaagggagattttagtaagtactgtttttataaacttttgcactaacctatgatgcatggtatgacatagcaccagtaagaatgagtacaactattacgactgcaaaagaagtaagaattgaggccacgatttattttcatttatcaaaccacctttttagccatctcaaaaaagggttgttgattctggctaattctgattggataaagtggtaagccctggcaaggccttcactatgctctcattgggggcagtattatttgggatgaaagtacaacattgagttttaattataacacacactccacctttttcagctaatatcgtatctagggccattctgtttttctaagccatttggctagtaggacctaattggtcagctattcctttgacagcatctctggtgtaattaataaactgctgctgattataatagatgtaatctatccaatctacatttttatttatttaatatttttttgagatggagtctcgctttgttgcccaggctggagtccagtggcgtgatctcggctcactgcaggctccatctcccaggttcacgcctttctcctgcctcagctttctgagtagctgggactacaggtacctgccaccgcgcctggctaatttttttgcatttttagtagagatgggatttcaccatgttagccaggatggtctcgatctcctgacctcgtgatccgcccgccttggcctcccaaagtgctgggattacaggcgtgagccacggcgcctggccccaatctacatttttattgatagttacccatggaaataatgattcaaatcctgcagctatttggtctcgggctttgaatttatcaggtacttcctgtgagactcccaattgcgtctaaataaacttaagagtcaaaagtcccataaggggcttctcttactttttggtattgtgatttttttttcctctgattgatgaaatgccagagtgaaagggatagccaactggacaagagggcaagtgctcctccagttagttggtggagtgcccagtaagggtccaccacaataccaccatatatctgctcaaggatggctaagggtggactgatgggtaagctcttggaagggcctaagctcactgcattccattaagcttcccaggaatgccaagtttttcccatgccatgagagacacaaggtgaaactgatgttgggagatggaagctggatggcccttgggggctgacgcacagggtgttggactttgggatagagcagagagaaagcttggcatgattcattgccccaagctgtagaatcttggaagagagttaccatgcagcccatgcccggttgactggagcaccatttgagtggaaaggggacaggtgtgccggccgtgtgcacaagcataacaattgcttttgtttaatgtgcagatgaaatttttgatccatttcaaccagacatttgtatcttgatatcctgttttaattgctagaatttgccttagatcatctactttacaatatttacttcagcattgttgggcagggtagaaggtttagatggagaaggaggagggaggttaataaaacgcactttaaagaagcatatagggttgtatccattagcctttactcttaagccgtaaaagtgctctaaagggggcataaggttggtggaggtaggagtattaatggagatagttactgggttacactggtgagatggacaattagagggggtggttcctttggtaaaagtggaggtaagattttaggttggtacagccctctggggaggtccagcctggatctctgatagtccagatgatatctgcccatttggaacatatctctcaatttggggtgtcttggtacccacgcagtcagcaagatgcagggtcagtgacttttctggaggggcagaggtatttttctaaagtagagatttgtctctgtcattgtccggcttcacaaggtataacaagacaagcatcaaaggtaataatttggggtgagtctgacctggttacattgataacaaggtggtcagcaataaaatgagaaaagaagaaagagtaatagaatagatgaaagagagttaagctctttttagctttagtttgagaggttttttctttggataatggcccatgactctggaggtggtggtgttttcttgactcgggtgtgatgggtccatcctttttttgctgtctggactacggttttagtggttagaagcaccaggtaaggtccttcccaggccggctcgagtttttcctccttgatgaggacgtgatccccaggctgatattgatggactgagaaccccagggttagcacctgtgtttggagacctttggttttaagaaaaagagaaagtagaggagagaccaagtatataattcctgaggaattgtcttttgttttaagtgtgggaacgtcagcagtggagtgtaaataagacaatctatagagcatctcataaagggaaaggcctatatcttttttaggagcagttcagattttcagcagggcaataggaagacatttggtccatggcaactgagtctttataacgaatttggttagatggttctttaagcactgatttgtctttttaactttccttaatgaaggtgggtgccaaggagtatgatattttcatttaatgtctagggcttgggatagctttttaatgatatgagctgtgaaatgggttccattgtctgagtcaatattttttattagcctgaacttgagcactgtatttttaattaatgccttaactatataattggctgttgtatttgtaaagggaatagttttgacccagtgagtgaggtgatctactgtcattaataagcattttatacgacccattagaggcatctctgtgtgattaatttgggtactttggaatggtcttaagcctggactcctttccccaagggataatctcttttatagtttgtttatcagttttcatatatttacatataaagcaactatctgtaacctgttttggctagagtataagttcctgaagactgcatcacacatggcctggggtccttaatgagtcctttgatgcacgtgggacaggacttggtctggtaatatctatttttactctgagctctctttagtgcctattcttactagcttttctttctcagtggaagagaaaacggagatcacagtaggaggaggaaggtaaggagttaagtggagaacaggcatttcagaagaaacggcagcctatttggcttatctgatctgttacgttattttcctgactcttaaaagacagggttttttttgtgtgtgtctggggacatggacaatagcgattttctctggcaactgaaggttattcaatacttgggtgattaactccttgtgaacaaggttttaaccttattaataagacctcgttcagtctaaaattttttcaaatgtatgagccaccacaaaggcttacttacaatcagtatggatgattccttcctggttctgcaaacactttaaggcttggctgagtgcaaacaactcacaagtttgggcagaccaattattgggcaattttcttgactctatttctttaagagcttcttcatcaattactgaatacccattgtgtctttttccttcaatcacttgggaggaaccatctataaacaagtgtcccccggtcctgaagggagtttctcctaagtttggccggacctttgtatggtaatcaattaaatataaacatgtgtgctttctttttagatttagaactcttgttaagaaacctgctgggttaagcaaattatcagtagttaaatcatcctcttgtttttacagaatagcctcctactcataccacttgtaatacttttccagtggtacattttatataaatgactctaaagaatcaaagttcttttctggtctggggtaaccaacagtgaccacattgaggatttccttatagaagtcttttatgaaggtatgcatgatatgtgtttccatgggcttctttgtattcttgtagtatgagttccatcctatgctcaccaccatcttatggacatctctacttccaacactggcccaactacagtaaatgccagtggatatatcagttgggagattatctaccacttgctcaggaaaattagcttgtggggatgcccagctgcttggaaccgcagccgaatcccggcaccacttggccccagcagcagtaaggcagatgtcccataatgcagcctgtttggggtatgggctgtggcctggtctgcgtgtcttgcagagccgccatttacatggtgcctgaaccctggaccagccgggtggcaggagcgtgggctctgcctaccgtgaaggcacaccaggggctggatgatgcctataacatgctgccacagacccttgatgctgccaaccctacaaaagccgcctggcgacttaggtgcatggagtccctttaagaagggatacttaggctgggagggaataggttcatagggtgttgattcccaagaatcagaattgtaagaggaggagtaacatgagtaggggaagaatctgaagcgggatctgggatggcaacagctgcctgagaggaagggattgggggcactgagcagggaaagatggtctaggggatcccacgtgatggtctttaggcatgggaactggcttttctaaccttttattatctttccaatattttaacatgaaacctaggaggctattagggggactatctttattgctatttttatcctttttactctttgtcttgcttgaggtatttcccatgttgggtcctagttaggctcaatgccttgtactagagacttcttgcctattcgtttctgggggcttgttaagactgaatcttttgtatcagtgatttcttgcctattcttccctggggagcttgttaaggctcaatactttgtacctcaatacctcgtatttcttgcctatcctttagccccacctactggaggtttcttgcacccttttttcgcttcgtccattctggccacttccctcgtgggaatatttcagatccctcttagcattgatggtgggtcagtataaacccctgacaggatccccaaagggccgccctaagccatatgaggtgaccatggaactgcagataggatgctctaactctgcacagcagtagtgtttagtaccatttacacaaccagcactgcaagcagtagtgcttgtgatcatttacacacacttttaacctccagaatcccaaccagcaaggaaatactttgtcgcccctgcaatgttctgactttgatctgtgcacagacttacctggtcaccgaggtatgtgagcttcctttccccaagctgctggcctgtttctttcccatgttgctgagagtccgggtttatttgtcacactgggtgggcctcaattcctttatcctggaggcccctgcaatgagggagtggggctcacttcttcatgggagaggaccagacaccctttcccagaggagaatgggaatcccggacgagcccccagatttgttggagataaatgctcggtgctgcaaagtgaaaccagtactcaggcaaaagttttctcagcaaggcaatttacttctgcagaagggtgtatctcgcagatggagcaatggcaaaaacagggagcaaaggagagaaggggtttttatctctaatgcatagtccctacctctgtgtcactcctccatgggctggggttggaccacgcaatctaagctgacctgattggctacttgtgaatattttttccaaataagaaaggggaaggggaaggtgagttgcagtggtgggacgtgtggtttcgaagggtgatgtgtggtttctaatgggtggaatgggtgcagagtgtttaaccaagggaacagatgtgagctattgataagagctgatgagaatgttgtttacagtaactagaggcaaggaggcatggagaacaagaaagttgagtttgagaacaaaaaacaaggaagttaacatgctgaacctttgaagagaaatttagaaaaattcattgtatcttacagacataagtttttcacctcatttgtataaatatttatgagtgtgattgctgggattgtgtggtaagactacatttagctttgcaggaaactgctgatgggtcttccagaatggctgtactattttacatttctgcaaacgatgagtgagagttcctgttgcttcacatcctcaccagctttttagtgtttgggattttagccattctgttccagtagatgtataatggtatgtcactgttttaatttacaattccctaatgacatatgatgttgagcatcttttcatatgcttatttgctacctgtatatcttcttttgtgtggtatcagtccagattttttgcatactttttaattcatttgttttattattgagttttaggagttcttcgtatattttggatactagccctttatcagatatgtgtattgcaaatattttctctcagtctgtggcctgtcttttcatcctatttcatagtgtctttctttcagagaccagaagtttttaattttaatgaagcccatgtttccattttttttttaaatggactgtgcttttggtgttgtatctaaagagtcgtcatcaaaccaaaggttacttagatttttgttttcttttagaatttttatagttttgcattttactttaggtctatgatgcagtttgagctaattttttaatttttgtgaatttttgtgcattttgagttaatttttgtgtaagttgatgtctgtttatttgcatgtagatgtttgcttattctagtaccttttttcagaaaaagactgtcatccctttttgatgtcctctttcagtgatgcacatgtttttttgagacagactctcactctcttgcctaggctggagtgcagtggcttgatcacagctgactgtagcctcaacttcagtcagtcctgctatctcagcctcccatgtagccggtatcataggtgtggaccagggtttcaccatgttgcccaggctggtcttgaactcctgggttcaagcagcccacccaccttggcctcccaaagcactgggattactggcatgaaccaccatgcctggtctcagtggcatagttttgagggtgaattatgataagtaaaattgaagaagaaacctgacattgttgtaattaataatttgacttcatatgcctttaaaaatagcttaggaggaagtaacatgttgaataagagcctgggctgtgggataaattctgaatttgccatttacttgctgtgacattggacaagttactgaactgtgcctcagtttccttgtacgtaagtgtatttttaggttaagtgaacaacatttaatataaattgtttagtacagtatcttgcatatgttatagctatggaaggttattagtaataaagacttatttagatgttttatgtatttttaattcatcagttcctattattctctatagtgtattacaggaaaatataatagtgttaacctatggactgtttctgtagttattgatgccatctggcagaagcagatttacataagggagtttaatgactgacccagaataaccatcatgaagagcatacaatgtagaaaatggaattctaaatgcatgcttatatgctcagtattttctaaaaccactaaataccattaaatacctcaagactaaaggtttgatgtgtaagatggtgcaaaagaactgtagtgctttaaaaatttttttatttatttgtgtttttgagatagggtctctcctgtcacccagtctggagttcactttataaaacatatttcctacctttgcatatgacgtattacacgcacctgcttgcttaatatatttaggattgttgcatattttagattttgagttatctctccaataagaatacaagttctttaggataatgtgtcttcagtttttcagtctgtcaccatttctggatggagaaggtcatgtttcttaattgcctgagaaattaagcaatttggataattggataacctattacttttaaattattgctttattttatcttgccgtttgattctttcttctggagtggatagagggaccatttacaatataataacgaaattcatatctgtttttaaagttagaactggaaggccagtaggagaaacaagggtcctttagggcaataccctgagtaaaagcaaagcaatttttttgtttgtttcaagtaattgctagtgaataaggagtatttctatacttcactatattcagcatttttctttgtttgtgttataaaacaagatattgggatgataattgtttaatgcactgataggaactgctattctgagttatcacaaactttgggttttgtcagttaaaacaaatttgagtgttaggttttgtttttttaacaagtgttgacattacttttatttttgtgtttgggaacttgtaaatttgtctgacattgattctaaaactttattgtagcgtaatattttgatctctgtgtatccaagcttttttcctaaaaccgctagatggcgtagatctgcttttttttttttttttttcctgcgatggagtcttactctgtcgcccaggctggagtgcagtggcgtgatcttggctcaccgcaacctctgcctcccgggttcgagcagttctcctgcctcagccccctgagtagcttggatgccaggcgcctaccaccatgcccaccgaatttttgtatttttagtagatacgggtttttgctatgttggcccggctggtcttgaactcctgacctcaagtgatctgctcaccttggcttcccaaagtgctgggattacaggcatgagccaccgcccagccagatttgctttttaaattaaatttttgtctctgagtcatttagtagtaagttagtcatggtacccctttctcttagatactttaattggtgatactctgggggtgttaaaaacaaaacagcaacaacaaaactggtgatcagaattagtttaacaacataaatattcttaatgaggatatcttctgaattatcctaataaagtagtatttatgtttttctgttacataaaaaaatccaggactttctttggtaagttgtacttcataccagttttaatcatttagcacagtagagagtactagtgagctatacattatgtagactatagatatgttaaaaagtacattctattcatgataaaactaataaactaggaatagaaggaaacttgctccatctgataacatccatgaaagaacccagagctaatacatagttaatggcaaaatattggatgctttctacataatattaggagcaatatgagaatgtcctctgctcccacttttttattttttttttagcattgtactagagtttctaaccagagcaattaggcagggaaagaagtaaaaggcatcagagtgataaggaagaagtatagctgtctctatttgcagatatttatggaaacatcctaagaaatttgctaaaaatctattagagttaataaatgagttcagcaaagttgaactcattttatgtaggatcgatgtataaaaatcaactgtttctctgcagtagaaatgagcaaactgaaactgaaattaaggaaacagttccacttataatgccatctaaaggaacaaaatacttatgaatacgtttaacataagtacaaaacgtataatctggaaattacaaaacattgttgaaataaattaacgaatacctaaaaaaaggatggacatcctatgttcatgaattggaagacttaatattgtttaaataatagtgctctcctagttgatctacagatccaaaggtttatcagaattccagttgccttttgcagaaggcaaaattccagttgccctttgcagaaattgataaactgatcctaaaattcatatggaaatacaagggatcctgtattagtttctgagggttgcagtaagaaagtacgaaaactaggtggcttaaaacaactgaaatttttctctcagtttagaagtgggaggtccaaaatcaaggtgttggctctgactgctctagggacttatccccgtttgctgcttctagcatttgctagcaatccctggcatttcttggcttgtagatcactaaagtcacttagatttcctctacctgcgtgtcttcataatattttctctcttgtatgtttgtctgtgtgtccaaaattctttttgtgaggacaccagtcatattggattagggccaattgaatgacctcattttaattttttttttttttttgacatggagtctcactcttttgcccaggctggagtacagtggcatgatctcggttcactgcaacttctgcctcctgggttcaagcaattctcccgccttagccacccgagtagctgggattacaggtgcctgccaccacgcctggctcattttttgtatttttagtagagatgaggttttgccatgttggtcaggctggtcatgaactcctgacctcaagcgatctgccctcctcggcctccccagtgtgctgggattacaggcatgagtgacctccacctctcccggccctcattttaatttgattacctttgtgaagaccctatttctaaataaggtcacattctgaggtacttgtggttaggactttaacatatcttttttggagtacccagttaaactcataacagactctgaatagcccctcaaaaattgaaaaataaagttagaggactcacatttctcaattttaaaatttacatcaatcaagacagtgtggcgcttggatatagagtcatggagtacgattgttagtctaaaaataagcccctacctttaaggtcagttggttttgacaaggataccaagataattaaatggtgaaagaattttttccccccacaaatggtcttagacagctagatatttgcatgcaaaagaatgaagtttaactcctgcctcacaccatctacaaaaattatgtcaaaatggattaaagacctaaatgctagagctaaagcaactaggagctaaaactcctaggagaaaacataggattaagtttttctgaccttggataggcaatggcttcttagatatggtaccaagcacacgagcaacaaaagaaaaaattgatgcattgaacattataaaaaataaaaccatttgtgcttcaaaacaccatcaagaaagagaaaacacagaaagggaaaatgcttgcaaattatatctgataaaggacttgtgtccagaatacaagaagaactcttacagttcaataataaaaaaaaagtccaattaaaaatttggcacaggttcttaatagatagaacttatgtatatctaattctacaaggaagatatacataatgactggtaagtgtatgtattagtctattctcacactgctataaagaactacctgagactgggtaatttatgaagaaaagaggtttaattgactcacagttccaaaggctgtatagggagcgtaggtgggaggcctcaggaaacttaaaatcatggtggaaagtgaaagaggaagcaagcttgtcttaccgtggtggagcaggagagagaaagagagagcatgaggggagaagtgccatacactttcaaacaactagatctcgtgagaactcactatcacaagaacagcaagagggaagtctgtccccatgattcagtcaactcccaccaggcccctcctccaattcatgaggattacaatatgagatgagatttgggtggggacacagagcaaaaccgtatcagtgcataaaaagatgctcaacatcattagtcattatggaaataaaaatcaaaaccatgagataccacttcagactcattaggatggctagaataaaaaagtcagattataaccaatgtttgttaggatatggaaaaattggagccctcatacactgctgtgggaatgtaaaatggtacaactgctttggaaaacaatctggtagttcttaaaatacacacatagagttaccatataatctagcaattccatgccgagttatatatacccatatgttcatatatacacatgttcatagcattattcataataactaaaagtagaaacaacccaaacatttatcaattgatgaatagagaaatcaaatatgggatttccataaatggaatattactgaggaaccaaaagaaatggaccaaagcatactacaacatggatgaacctggaaaacattctaagtaaaagaaaccaagcataaaagaccaagtgttacacgattccacctatataaatgtccagaataggcaaatctgtagacagaaagtagattactgtttccttagggctggaatggaaggattgggggatgacacctaagaggtacagtgtttctttttggggtaatgaaattgattggggtgatggttgcacaagcctgtgaaagtactaaaaatcgttaagtgtgcactttaagtgggtgaattgtatgttatgtgaatcataacttaatgaagctactttaaaatacattcaattattatgaggataaggaaccctatgaaatgtgtacatatttgaatatttaacatgagatgttatgaagtacaaatatatatgctgccaagctgttcataaagtatattgcaagccacatatataattaaatttttctaatagccacgtttttattttttaaagaagggatttcactattttatccagactggacttgaactctcaggcgccagtgatccttctgcctcagtcttctgagtagctgggactacaggaacatgccacctctcctggcttctaatagccactttataaaaacttaaaagaaatggatgaaattaaattgctttttatttatttatttttttgagatggagtctcactctgttgcccaggctggagtgtagtggcgcgatctcagctcactacaacctctgcctcccgggttcaagtgattcttctgccttggcctcccgagtagctaggactacaggtgcctgccactacacttggctaatttttgtatttttagtagagatgaggtttcaccatattggctaggctggtattgaactcctaaccttgtgatccatctgcctcggcctcccaaagtgttgggattacaggtgtgagccactgcgcccagcctgaagttaattttaataatatattttatttaccccaatatataaaaatattaacatttcaatatgtagtccttaaaatctgttatgcatttcagaatgttttgattcaaactttgctacttttaagtgttcagtagcttcatgtagtgactagggcaacataaatagagacattaagtgttaatccagagggaggagtaatcactgtagtctgaaatgattaggaaaagtcacaaaaattgagttattttgctcattcattcatttactgatttcagtcatttatccaacaaatatttgagctcttactgtttatttaaaaaactagcaaaaactgcagatatgtcttatctcctcatggacagtgcattaaagagctaagtatgtacttacttagggctggttgcttaagaagtagtggaaagagtataggcttagatttaaatattcccggtgaaacagaggatgatggtaactgcattgtgggattggtgggagtaagtaaaatcggtatgtcacatgcctaacactgtgctgcttgttaaatgttttctccttctcttttcctacttcaccctctgtccctctacttccttgttgaatacatgaggtgggccatgggaaaaaaggcttaggaagtagcagagtcctggctacccaaggacttgagaatgagttcttaccctcctttcttatcctcagccttctttcacgggccttctttccatggccttgcttcctggacccagattcaagtttgtattattagttctaaagcctattaaccagtattaaaggggttttggtgggctaatttaggaatgtaattattgttttttctagagatttctgtgtttcattccatacaactattttattaatgaaaatttgaaatgctatctgctaaattagtttgcatcttactcagataataatgtgttttagaaatatttcaagaagtgttgatataaaaattattttataccttttttgaaattccagacctaccattgaatacttagcactttggtccatgtaatttttacattgtgcaatatctttgaattttaacatactcttttacaataagacttattaggtctagttacattatgtttgagacaataatagatgagtttgttgggaacagttatagtgtattgaacagagtttgttaggaaaagtttttatagtgtattgaacactggatttagattgggcagatcttgatttttccattcgttagctgtgtggttgtgagtaagtacatttgttcactggtttttgattcatacagaagatacagtttgactaatatggtcagggcatgattgtgtgtttacttatttaaaaattgtgattaagtgctttgaaggaaaagaactggttactgtgaatataataacaggtgaaaactactttagattggattgtcctagagaaggcgtctctgaagaagtgaggtttaagctgagacataaaggataaaaaggaagggattagggatggggatggtaaaagaatattgtaaggaaagggaacattatgtgaaaaagtcctgaggtggcaaaatgctttgtgtattcaataaatggaaagaattctagtgtgaccgaagggttgtgagcaagggaagaatggcatgatatcagaatgaaactagatcttacagggttttgtaaaagatgctgaagcctttaaggagttttaatcagggaaatgagacacaagtgtaactccaaagtgggaagttgaatataggagtctctaaaggttgaaagggtagtcaggtctacagaaatacatatgagaaccaacagctctcaaatggtaacaatttggataaataccatgtatttaaagatctgggaatgcataagctaatctggggagagtatggagacagaagatagagaattgggagtctaggaccaagcctagaagaaccccaacatttagaagctgatagggaaggaactagcctaggaggacctcaagtgagcagagtttttttggatgaccgagaaagtataatggttctgaaatggcaatagggaataaggaggatgtgattttttttcccaactagatataaacctttttttcacaactttgtcataattcaccttctaaaagacagactgggggacacagctgaaaacactgggaggccagatgctgatgtctttcaagccagagcatagctgtggtcactctagggccaatgtgctcctatggttctcaggcgtcacggaccagatgcacctatactgtccaatcccagttttacttagagccacctccttttctgggggccatccatcctcatttcatgctagatttttactagaggctccctgttcttccacaacagtttatgaccataagtaacataccatattccaaggagagttccccaggatgcaccgcatgatcaaaacatttccatcccgtgatcattcctgctgtatccatggccataatgacttttaaggcattcgctgctgtgaatgtgaacatctgaagggaaataatggcaagcctcccttctgggatcttagtgcagacagctgcaaggaccatcatgatggtgccagatgcaccaagtgatggtccctatcttcctgtggcaactttacacacataactgatacaattggaaataacacctgcagataataacactgctcttgacccagaatgttcactgtgctggaggcgaagctccacaaaacatagatatttgctgccgtgtgaaataaggagaaataactgaatgttgacagcaacactggaaaagaaagaacttttgaggctggattagatgtgaaatatctgatcactgtccgctgcagagatggtactctctatcaacagaatacaacgacattcgtttgcacctgtgataatctgtcacagtttactggccatcgcttaggtgactccaccacttgttattctcctttctgaagtctcctttttgtggtcttatgctatcccaaccatcaacttttatatcatcaaaataactctggaccctgaattttggtgattcatattgccaaatagcagctgatccaaatgcacaacctgtaaacccaacagtaaaaaataaaggttttatgagagtccctataggatacagagaaggataaaaggctgtttcttccacaggaggaatcaaagcacttctcttgtatgcttcaacacttgtgcctatgtctgatctttgaggctcagctttcctgggtgcttttctgaatctacctttttgctgaagaagtcaaacctgtgtctgagcagccgtggcgggggcagggccatagtgagttccttgcagctgcggctgctcactggcggagaccatgtctggtcgctgccccagcctgtctctgcccagcctcaccatgccatcttcccaacctctgccccaccatggcctgcaaggacatggttttgagacgtgtggaggaactgaataacatcagcctctgtgggatttattaaagtagcatatttgggggagttatgttttccataaggctagaaagtggagtttgctgatcacagaagaggtagagttgaggagttgattcagatgagagggatgtgtggagtagtaggggcgtgacagttaacagcaaatgagagaggctagtatttctggtggagacttaggtaaacaaggatatgaggtgttgatagatttaggccttttaatctcttgtaggctagacggatctatggccttagtggcatagtctggaaagtttcaaatagtttgttgggtaagggccaagtttctcatgaggtaaatctgcctcagcaggttctagttatggtatgatgaggctccaggctggtctcctcatttcttttatctattaaatagtaataatacctcattaattgttatttaaatggacagtcacatagtagttaattaagtagttaaagttgagtctaaataaacatacagccttttacgaaatcttttaaacatacatcccagtaagtcgtgctctagccaacttattctcttgtcactcttttgtgtactgaatataacaatgcctaattgaagaataaacgttgactatgaatgaggcactcaattcatctctttgctgattacactcaattttagaactaaggataaattattcaagaaatagttgctgattttttagctcgaagtgttctgtaagcatacttggatttttttttagaacccagtgacagtaatacttctttggagagaatatctttgaatatctttttagaacttcaagcaaatttatctttaaaacattttatatgctcagtgtagataatttggaaattacagagagatacaaaaaagaaaataaaaatttgcctgtattctcactatctagagaaaactcctgtttactttttggtgtgtttgtgtagcatttgttttcaaaattggaatcacaatatatagcaatttgtagctatatactctgcctttttatgtaatcttgtgtcatgaatattttcctaaaccattaaatattcttggaaaatgtaattttaatgagtacataatattctgttcattgtgagtgtatcgtagtttaccttatgattctctgctattggacgtctggattggctctaatttattgatgtggtaaataatgccttaatgaatatctttgtaaatcaattattttcttccattttctttttactttcttttgccgtattcctagaaagggaagtactgggtaaaagaatagggcttcatttttgttgctcctgctttttttttttttttttttcctgagacggagtctcgttctgtcacccaggctggagtgctgtggcgtgatcttggctcactgcgacctccgcctcctgggttcaagtgattctcctgcctcagcctcccaagtagctgggattactggtgtgcaccaccacacctgactacttttttgatatttttagtagagacggggcttcaccatgttggccacactgttctcaaactcctgacctcaagtggtccgcctgcctcggcctcccaaagtgctgggatcataggcgtgagccactgtgcctggctgctcctgctgccttttttttttttttttttttttggagatagagtcttgccctgtggcccagactggattgcaatggcgcgatctcagctcactgcaacctccgcctcctgggttcaagtgattctcctgcctcagcctcctgagtagctgggattacaggtgcctgccatcacgcctggctaattttttgtcccgctgcttttaaggaaaattatacttcaagatttcatatttaaaaatcaatgtgggtcaggctcggtggctcacgcctgtaatcccagcactttgggaggccgaggtgggtggatcactcgaggtcaggagtttgagaccagtgtgactaacatggtgaaggcccatctctactaaaaatacaaaaattagccagatgtggtggtgcatgtctgtaatcccagctacttgagaggctgaggcataagaatcacttgaacccgggaggtggaggttgcagtgggtctagatggcactacagcactctaacctgggcaannnnnnnnnnagagacaaggttttgctctgttgcccaggctggagtgcagtagcacgattatagctcactgctatctcaaattcctgggctcaggtgatcaacccacctcagcttcccgagtacctcagactatagttgtaggccaccatgccaggctatttctcaagaatttttttatagagatgggcttcactatgttgcccaggctggtctcaaactcctgggctcaagcaatcctcccacctcacctcccaaagtactgagattgcaggtgtgagccaccattcctggacttcgtgtaatttttttcttctctccttgctctctggaaaagatcagatactcattcaatctgggattcaaatacctgattttagattaaaatatgtggcttcccagaggctttagttttaccatgggaatagtcttcacccccaaatattgacactcttagcggtgggcttgcagtcatggtgaatgggggaggggtttggagcccaggcagcctcctgcctaatccaggcatcaggcttcctggggtctggaaggttgactggtgtgaaggagagcaggctgggaatggccagggagtccatagtgggaaggagggagggaggagctgagcatgaatgaagggatggagagatgtacccaagagacagaggcagtgagtggaccacaaggagaggtctgggtcgggggtgctctgggggtacccacagttttcctgctttttatctctagattcctctggagagactggaagaccaagataatcttatctctgagaaaatctggttcatttttctctcttacaaagatcatttaagcctcagttttctcatctgtaaaatggggagataatccttacacacagtgacaaagttgagagaggcagattaaataacagatgtgactgcactgaacacacacagggctaatgcctggtgcaaagtaggtgcttgattagtgtgcatggctgacgctgtgaaggggcccgcatctgaactcagatgtgcttgaattcccactaggtttgaatctcagcctctctccaggttatcaggaccatgtgcctttgacagtttggaaacacctcagtgtttgaagccacaaagattcctagagtagagttgtgtggaattcctggtcagggattttcaaaatattttaaccacataaccctttgtttgaatgaaattgtacattgaagccttgtgtgtcaaacaggtaaaatggggctgggctcgtggcagcacagagtgaggggttcggaggtctgaagacagcctctgcatcttccccaagacacttgcccaagaaacttccactacacccaaagttccattgttggaaactgattccagtctaaatgtcttacttgtggttggacgagggaaactgaggatcatggagaaggaagataattgtccaggataactcaagaggtcatttgctttctcttggactcagtttccccatctgtaatcaggagaggaactcagatctcccctattttctttttttttttttttttttttttttttttttttttgagactgagtctggctctgtcgcccaggctggagtgcagtggccggatctcagctcactgcaagctccgcctcccgggtttacgccattctcctgcctcagcctccggagtagctgggaccacaggcgcccgccacctcgcccagctagtttttttttttgtattttttagtagagacggggtttcaccgtgttagccaggatggtctcgatctcctgaccttgtgatccgcccgtctcagcctcccaaagtgctgggattgcaggcttgagccaccgtgctttctggctataacgccagtctaaggcatgatgcaagcgccacctggtggtgagaaagggctctggaaactggagagaaaccctgctattatttctccaggtttaggcaaatgtgaggttttatgcaaatgatcccacctttggccagagtgatacctctcaggattataggactttcaggctccttctcctattcctcatgctctcacactgaaaggagcatcaagaagcccaagagaggtatcaggaggcagcttgaaaatatttcccccggctctgccactaactcctgtgtgatcttggccatccaagtccttctcctctctgagcctcagctcccacatgtgcaacctgaggaggttaggtgaatccagggttcttaacttgagatctatggatccatggctggggattttgtgaaacacttgacattttaagaatttgtgtgtgtgtgtgtgtgtgtgtgtgtgtgtgtgtgtatttggcggtatagcattgcttatttctctgtttccagcagtggtttattttagcattgcttatttctctgtttccagcagtggtttatttttgtgtggatttgcagacccccttgcagtaataaatccttacaggttctctttggcttgtacgttgagaacaacttctatagattataaactaccccacttctctcccgtatcctttgtttcactgctcttgcttcagcagatgccttacaagtaactcttcctcctttattgttttttcctaacatcccttgcttgatatttggggaaaatgttaaggcttttaaaaaatcatatttgagagcgcctagtttattgtatcccttgttaacaccttgagtgtttattttttaatatttgctgatttgtgagatgaaatatgataggtatatttgggggtaggaggaatgtctgaaataaattctttcttcccaacttatgatttaataagagctggaaggggaaaagtaaggtgtaaaacccagtgtttgacatttttatcctcttaatctggctaccgtccaacgtactttcagagctgaaggggctctaaatttcgtatttattcagtcctttcagtttacagatagggaaactaagccctaaaaaggacattccttgacttcctcaaggtcataagccaaacagtgttagaagtttggcctgttttttcataacttagtgtgttggtttttctacaaacatcttctgcgtctctgcaccatgtgttccccagcctgcctttcaggttgactaacttttaggtgactatgtttttttctgtttggaggcctggtagactcttttttatccttcagtttaaccacagtactttgatcatcctgagtcagttcttgcatacattgtacctttttgccctgcagatagtgctctcaatttcaaggaaagcttcaaggaaattttctattcatgtgtggcatctacttttggaacaataattatccttatgttggatcatctttgttcttcacatttatcatcttctccagaattactttaatctgttaagtgattccctctgcattcactattatgatttcctttcttccctgcaattaatttttcactatgtttttttctgttctttgctgtttctagtttattagatctctgatgttttgttcagctaagaacaaacagaactgttgtaggttaaaaaacagccctccagaagagatctgtcacccaggcttattgcaacttctgcttcctgggttcaagtaattcccatgcctcaacctcccaagtagctgggattacaggcacccgccaccatgcccaggtaaatttttgtatttttagtagggatggccaggctggtctcaaactactggtgtcaagtgatccgcccacctctgtctcccaaagtactgggattacagacatcagccaccatgcctggcccccaaaagaatcttactttccattggcagtcactccccatctcctgacatgcactgcctgccttagacaaccaggtagattagtgagtctatcttcattctatagatttgcttattctgaacatttcatatgaacaggatcatacaatatgtagtcttgtgtgactgtccacttattttcaatttgttaaactccttcaagatctttctttttacatgccttctgccattaatgttatctcttcccaccccattgcttccctcctcccgctaccctctcacactttttagaatttcagctgaaatactactttttcggagggacctcccctaatgggattctagatactccattatggacttaattgtgccccaccattctcttttgtctcttttcatttattatctaatggagcagttatttgtataaataatatctgcttctctcacgaggtagggagtttgttgttgttttgataaatacttagatgaacatattcaggcactttacccagtgggaggggaaagagattttcagagaagagagatgtgtgtacgtatgttaactattaacgtagcaatgaaaatgtaagctgaaaaaatagaaaattagtagttaattaggctttatgtatgtagactggacaggtaccataaagaatgtgtattatactctcccagcaatatcatgaatctggaatttttttttttttttgggacagggtcttgctctgttgtccaggctggagtgcagtagtggctccagtagtggagagcatacatgactcactgtggccttgacctcctgggctcaggcacttctcccatctcagcctcccactgttgtgtgccaccatgactggctaatttaaaaaaaaaagttttttttgtttttgtagtgacaggatctcgctatattgcccaggctggtcttgaactcctgggctcaaacagcaatcctcccacttggcctctcaaagtgctgggattataggtgtgagccattaaaacctaagactgttaagtgccagcttaatttttggagtccatttatgttgttggttagaatatttggaatatttaccctacctgaaaagttgaataaaactgatatattctgttttaaatttcaattcagcagttcagtttttcaggctcatttgtaaataatggtgcatattgcctacatgggtcacaatttatttcaggaaggtgctgcatcatctgctttcatggagatcttaatgaaattggctgctcttgacctctgagagtcaccatttcttcatcttttcatggtacctggatggtcaggtacactgttctcttctccgttagtgtttgctttactctttagtggatactagagatacctaggacaaaggtttgtgacgagggtgtgtgtatgagggtcttaagataaggaaaatagtatttttcttcttgattaaatttagggggcatcatgaaatttaagtaacaccttaagggtaataggtcagatggctttttgttgacattattgatctataaagttattgctagcactgtgtttaccatattaagtattaaaaccttatattctgtgggactcttcacatgggtatatagtttcagtttttataatggaaattggtgagaaaaaaggatgactacaaatttttgttttgtagttaacttttattacagtttcatctaggatgcatgaaagtacatggaacttgggggctgtgttggacataatcttggagggacacagctcaggaaagtcttcagtggaaccttggtcttgttacttgcatatagtcacatcaaaccttttaaagtttctactgattttttttttttttttaatgagtatgtgttaaatgcttctgcaggttgtagaggtatggtataaagaaattcaccagcagtcacagctagcagacttgggctagtcctatcctggtatatcattaagtcaggtagttaacagtaggagatgacaaagaccattttaaaaagggcagttaggcatgtacatatttcccaaggatgaaagttctgtttcaagggaaattgtttcctactttaatgtccttatctacttttgacactgcaaataatgagtaagcagtgtgggagacacactgctttggcgttggatgtcttaagatgttattccatgacccaccaataagaggatcagtcttattttatttctcaggcagtggtaaaggaaccgagtcccaatggtagacccactgtgagtacaggattgtgttattccagtggcttttatttaatagagcccagttagcatctcttctagtagaactttgtggggagaaatgctaagtggactgctttgtgaattgacccacttaatctgacagtactcttcctcattgaggaggtggacttggacatgccctatttgaacgacattgccaggttctctaaaggccggtctttctttctttcatttctttcttttcctctctctctctctttcttttgtggggagagaattgggagatgttaagcaagcttttagagggaggaagatgaggcaaatataaataccaatatggatttgattataagtaactgtgatcagttgggacaatgttatttaatatatgcatatattgacaatattgtgggtttggttccagaccaccatgataaagcacatcacacaatttttttttggtttcttagtgcatataaaagttatgattacactatactgtagtttattaagtgcagtagcattatgtctaaacaaccttaattaaaacatcctttattgtttaaaaatgctaataatctgagccttcagtgaatagtcatctttttgctgcttagtgttgatggctgttgactgatcagggtggtggttgctgaaggttagggtggctgtgacaattgtttaaaatgagacaaccatgaagtttgctggattaattgacttcctttcacgaaagatttctctgtagtatgagatactgtttgatagcattatatttgttttagtttttaaaagagatgggtgtctcactgtgttgtccaggcaggactcaaactcttaggctcaagtgatcatcatacttctgcctcctggttagctgaggctacagtagccagcaccccaggcattatagcattttagtagaactttcaaaattggaatcagtcctctcaaaccctgctgctgctttatcagctgagattatatcctaaatcctttgttctcatttctgcagtagtcacagtgtgttcaccaggagtacattccatctcaagaaaccactatctttgctcattcataagaagcaactcctcatctgttcaagtttgatcacaagattgcagcagttcagtcacatcttcaggctctgtttctaattctggttctcttgctatttctaccacatctgcactgacttcctccactgaaattttgaactcctcaaaatcatccaggaggattggtatcatcttccaaacttgtgttcctgttcctatgaatcatgaatattcttaatggcatatagaagttgtttagtgtagccatcttcatcaatggtcttagctaaatcttctggataacttgctgcagcttctaaatcagcacttactgctttactttgtgcttttatggtatggagagggcatctttcctctactagcttcaaacttggcagcttcctcacttctgtcggccttcatagaattgaagagagttctggcctcgctctgggttaggctttggcttaaggaaatgttgaggttggtttggtcgtctgtccagaccactcagaccttctccgtatcagcaataaggctattttactttcttatcattcatctattcactggagtagcacttttaatttccttcaagaacatttcctttgtattcacaacttggtggtttggcacaagaagcatagctttcagcctgtctgggcatttgacatattttcctcattaagcttaattatttctagcttttgatttaaagtgagagacaggtgactcttctctcacttgaacacttagaggccactataagcttattaattggcctgatttcaatatcgttgtgtctgaaataaggagccctgaggagaggaagggagatgagggaacagctggttggtggagcagtcagagcacacacaatattaatctgttaagtttgctttcactaatcacagatcaccgtaatgagtataataataatgaaaagtttgaagtactgcagaaattaccaaaatgtgacacagagacatgaagtgagcacatgctgttggaaaagtgacactgacagacttggttaacatggggctgctataaaccttcaatttgtaaaaaaacataatttctgcaacatgcaataaaatgaggtaagcctagatatttttctcttaggcatgttccttgtcttattaactataaacttagcatcgttactaatgaagttgtaaactagaatttaatcagtatttgaaaatgtatggtatcccttgcagaaatggagttaatggcagaactcgtagttattacctgctattttattttccatagttaattttaagaggttcttataaagttgtttggagatactctatcttcacaacagttaaaattgtaatattttaggcatatctcctcctcctattttgttatacggaaaagctttagctgataaacagattgcattctaaaagttcataaattattttggaacttagaaagtatttttccgtagtaagttttttttgttttttttgttttttttgttttttttttgtttttttttttgagacggagtcttgctctgtagcccgggctggagtgcagtggccagatctcagctcactgcaagctccgcctcccgggtttacgccattctcctgcctcagcctccggagtagctgggactacaggtgcccgccacctcgcccggctaattttttgtatttttagtagagacggggtttcacggtgttagccaggatggtctcgatctcctgacctcgtgatccgcccgtctcggcctcccaaagtgctgggattacaggcttgagccactgcgcccggcccgtagtaagttttgtaaataagtaaatacaaataggttcccaggctatcctacaaaagcctaatgaagccatagttagttcaaatatctatatacttacagtgacacataatagaaaataatatggcaagaatagtagttaaacaaaaccaaaacgctgttaagaactagttttgaaaaattttcttgtatgtgattgataaagggatgtaatcagagggaggtcaggcgtagagacttgcaggagtctgccaggcctttctgtgtcctttcaggtactttataggttgatggcatttctttcttttgatattggtatacagcagaaatgctatctttttgcttaccagctatggttaaggttgtattttaggtcctgagtggaatgaaaaagttagaaaagaattagtttccttagataaaaagatatgaaagaacaatggaagatagagtaacctaggatgtgtgtttgaaaaagaaattgtttgagatagatttcattgacatacaaataatgcaagtttaagggaatggggtagagtataacatgtgaatgattcctgatgaaggagagcaaagatgttgataaagtgtgttgggttagcaatccttatgctggtcaataagtggttttgaatatctttggaagctatttagaactgggaatggggagtagaatgctactttggtatttttatatgaactgtttcagtattgttttttcataacatggtacaacagctcaccaaaaatatttaaatagcttgatatacatttggaatgttttttgatgtattaaactattattaagaaaatatattttttgaatgtatgaaaggtgaaagtaaaatactgtactttaggtaattcaacaaatgcctacaattattatgtgatgagagagatttggtttttacattcttttttgtttgtttgtttattgattagaaaaaccatgcttcctttttcagtctccaaaatgtttcttatttagaagaaaccagtgcaaaaagaaaatcaggaaatgttccttctattcctacaaaagtagcagctgtcgttaggctatgtattattacttagtattgtgataaatctgttcaagtgtttaaatgtttgctatctgttcactgatttgatttgcctgaggggaatttctggcgctctttttacttgttttagatgatttgtctctcaggtagcttcgtatatcagcaaaatgacacagttttatatttaaagttattttttgcagtttatattagaagatgtaaagacttactcaaaaggtatggttatattggactgagttatttttatggatttattttagaatgtaaattgttcaactcactttcacttttataagtattggaaagtatactaaacgtaggaattggatgaggcaatttggatgagtactataagactatagtatagtttttaatactatacagtctaaactgcggtgttatactaaactatagtttttaatactatacagtcattgctgttatacatggggcattggttccaggaccactgggcacgtcaaaatctttgcatactcaagtcctgtagttggccctatggaaccactgtatgtggaaagttggccctctgtatatgtgggttttacaccttgcaaatactgtacttttaatcttttaatctgtgtataagtggacctgcgcagttcaaacccatattgttcaggggtcacctgtatataacctcgagcaattttacttattttttgagtctcagttccctcctccctgatttagtactggtttttcctcccttgtagggctgttgcttagatcaaatgagataatgggtctaagtgtgcttttaaactgtaaagtgcttcacaaatttatttgtgatgatgagtgatgacggtttggtgatcatgattggttctagggaagactgtcaaatatatgaattttgtctgcattatcttctcaatctgttgaattgacttctgtcttttaagagggtgatgcagggtccaaggtcatctctgaggtggaagtagaggtatttattttggtgacttttagactttagcttccaaagtatagtagaagcctatagaaatttgtcacttataaatgaacaaatattttacagactgctatctgcatagtcataaaatgggactccactagtgtgtgataaccgtaagtgttgccctcatggattggttgttagttgttaaattgtaattggtaaagtatgtaggactgacagagtaagcagtagtcttctgggaggaaacaaatcccatcctctctcctcccctccctgctgtttcaattcaacagcaatttttaattcaataacctccactttaaagtgataaaaaatgtgtgtggatttgtatgctgtgctatggaaaaagcagtttagattaaggagtgcagatgtctttgcatatttcaggagagggcagggttaggtaagctgttacaatgggggcatttgggttgtcagaatgcaatattgaagatcaaagggatgtgtggtaggccaagaacagacctaattgatttaaaatgtatatgtagagcactgatctggtattactgtcactaaagactacagtaaaatatacccgctttttgagatctgttttctggctttcttctggctgctcaaggttgatgtttctagatgtgaccgctgacgggatcagtgagtgagtaattgtatttttaaaggtaattgtttacgtctttagtttaagtacttaccatttgctcttttcatccatgtatggtgtactaattctttgataatctggtaaccttccttcttaagaaaaatttaaacgtagtatccacccttgccctccagcttataaatcaagcggataagcgtgtttaagagttaaaaattataatgtaaattcctaaaagccgaagatttttgtgcgcatgctgtaagccttttagatgtgtatggaaaataaacctgtttctaaaatacgtcttgaaattatttcaagtgaggacttaagaccaagtgaagtatttattcactttgggtttggtttgattttattccagttgagtgaagttagagaaaaggaaaatacacttgattccagtttatggcttataagtaaaataatgtaagttcagactgttggaaattagcatgtttctgattttaggtttattgtttggtttaaagtaaaatttggttttgaggtaaaaccaagaagataaaaaattgagtcaattaaaattggctcagaagaagtatggatatttcaaagaaaaaattgggatggctaatagatatttccctcagcaccttttgtaagatatttggggttttaggttttgctgaacacaaaaagttggtttcggggcctaaatacctatctcttatctttatgacatggtccttagcaaagtaatgtagtagggcacaagttttgcagtaaatggacaggtctgagtcctgtgtgtatgagttattgaagggattactttgagcaaattatcaaatctttttgaacaccaaaattttctcatttgttaaattgagtgttctgagtatgtcgcgggctttttgtaggaattaaatggtgtgttgtggctcttcaagtgtggtagctgaacctgcattaagaagcatttgaggtgcttattaaaaatacagtttctggagccccacttcagaaatactgaccttttgggggatatactctagagtcttcattttagtaaactcccaggtgattctcatgcccactgtgagtggtgcttgcaaactgtaaacagttctcaatgaatatacttacataaattgaacttaagatctcagatttgtctcctgtccagtttttgtcagttgctgcatattgatgctctaaagaaaccaaaattgtttggagaagggttagaaacagaggaaatttccgacccatacctaaatacacatgtgggacattgagtcatttgttttggctgctcgttgtcaccatgttttcagtaagccctccattctgttttactacttgtaaagtcttttctatgtaccttcttctcaggaatttatatctgaccaatgacaagcataggaataagcaaaagcactacttagttttaacatgaagtagtcagcttgcaaatcctaacaattctgcttgaataattcttataagttcagtggcaaacctttgctgagcacttgcattgtgctgaaccttgtgcacatgggaaatgtgaatgattccaataatgtctagtttttcttatttatttatttatttgaaacagagtctcaccctgtcacccaggctggagtgcaatggcatgatcttggcttattgcagcctccgcctcccagattcaagtgattgattctcttgcctcagcctccctagtagctgggattacaggcgtgcaccaccatgcccagttaattttttgtgtctttggtagagatggggtttcaccgtgttggccaggttggtcttggactcctgacctcgtgatctgcctgcctctgcctcccaaagtttgggattacaggcgtgagccactgtgcccggccaatgtctggtttttctaagagctcttagtgaagtaaggggttcagacttttaattataggacattgtgctaaataccgtgatagggcacatgtgagtggtaaaagagcatagtggagcagaataatatattctttcctatttccactgctaataattcaaagttcaaagaaactgtaacttactgagcactcactacgtggcatgcatttaaaaaacctatgtaacctatgctattcaatcatcacaaccctaagtagcagctgtctccattttatagatactaagtaggttgaacttgtgatataaacctttgtatgacttcaaagcccatattgttttcattatgcctctaaggacaaaattttattttatttttttaaagaagggaatgttatgattcttcagaattgatgtctgttaatttcagtagcatgatgtcttcctgtgattgaaaataactctggagtctttatgtcatctctgtcctctgccaccctatgttttccttttcatttctaaaagtgatagacaaggcaacatctccagaagccagcctgtgtgacatctgtccattttgttttctctgtctctccttttgtttactcttcctatccccaaaggaaatttagtaattgttctgttttgtttttcctaatctcttagattagaatcatgtgaagatgaatggtatctaagggaaaaggccctattaggaagatttttatcacatcaagtttacatagaaattgccctggaatttttatcctgctgttgatcattagggttgatttgattgattcaactacttggttgatatttgttttctttctttgtagtttcatttgttccaacatatataagcagttgtgctctctggctagagcttccgcatcataaaataaagcccctattttaatcacaagaataagttcatttttgaattttctaactctgatcccatggggcccagttttctactttttatttcctttgctaattaatttttatgttgttttcttgtttctagcagtttgtttattttggggagaacatctttgctttttaaaattaaacttattttatttaaaaataaatagagacagggtttcactatggtgcctgctatggcctcccaaagtgctgggtttgcaggtgtgagccaccgtgcctggcccaacatctttgttgttgttgttgttgtttgttttgtttttgctttttttttaaatagagtctcactctgtcgcccaggctggagtgcagtggtatgatcttggctcactgcaacctccgcctcccgggttcaagtaattctcttgcctcagccttccaagtagctgtttgtatttttagtagagatggggtttcatcatgttggccaggctggtctcgaactcctgacctcaggtgatccacccaccttggcctcccaaagtgctgaattacaggcgtgagccaccgcgccctgccaacatctttgttttaataggtttttttttttttttttaaacctggattctttgaatagagttgaacttcaacttaatctgaaaaatttgcagtggccagagtttcctcttctgacagtcttattcatacctgaagatgagggtcttttgagtaatttatataatcatatttttcaatagcgtcattgttgtaaacatcttttaaaaatagctgtgtgttatttctctgcatgatacagaaataattggcagtgccttttcccctgctattactgttgttagaaaatgtgaaaatgctttgtgtcttctgtgtattcatgggtagtgtgctgatttctctaggcttttgttgcagacttttaactttctgttatttctccgtggagacttcattcttgaggtgaaggaaaatttttacagaggcagtcattgcagacttaactctccacagcagggtcaccagagtattagactgtggcataacttttctcagtttgtagtatagcttattcatattctctaaaagactctcagttacaaagtgtctcagttgttgctttttctcagcactggattttaagaactagtctccttgaaacaagaaacatcaaattaaatgcctttgttaaatgaacaaagtatgctcagctttgagatttatcatttgaataaaattagagtgtcagtgccagacacctacctactaaatatttaaacatccttgaagtggacttttggcttttggatactcccctcatatcttggatgtggtcagtgtcaccgtgttcatcgcagggtggattggtctgaggagtgacttgagaagacttcagaaaatatgactacaaaatgttgtttacaggtacaatcctgtttttaagagattgagaactaggctgtgtgtatcattttgggatatgcctaaacttgccaagacttttgtaaaaattgtattctagactggatgcagtggctcacacctctaatcccagcactttggggaggctgaggtaggaggattttagacttaagaccaggagttagagaccaacctgggcaacaaagtgagaccctctctctccaaaaagttaaaaaataaaaaatattagcgaggcgtggtggtttgtgtctctagtgctagctacttgggaagctgaggcaggaggattgcttgagcccaggagttcagtgttacagtgagtgagctatgatcacgtcattgcactctagcctggacgaccctgtctcttaaaaaagaaaaaaaattattctgtatttaacagccttcaatagaacgtgattgttcttttgtataccatcttttcattgtgtcatgaggagtctattctggtttatgtatttaagacttatctattatggtaaagagtagagatttaatgctgctttttaattatgtagggaatttgtacaatgtgagtgaagtcctctgacaggagagagggcctgaagctgaactagttcctgctgctgtgctgttgtaccttcaaggtagtttcgaagaccaattttattataatgccatataattagtttggaaattactgtttcatgtatgctaggaaaatttagaactggacaaaatggttattttttgtttaagcagatttgttacgatttctagtttttcttgaggattttggtctcttggaagcagtgctatggtctgaaatagcccaatttgttgtagcaaatattaagttgtttggatgtcacagaatcaactgttgtacatttttatttttcatatggttttgctttggtataaatttcaaaacctaaagttgctaaagtgtctctgggaataggtgttgatattaaggagtacatggttgaggccagaaaactataaaaggctgttgatttattctcttacttcctattactctggagctgatccttttacattatgttatcagaaacattatcttcttttttttaagaggagatggagaaaagaatatgaagttagtggtagtaggaaagttttaaaatatagcagaggcagcatgaggcatgtgatgagttctgctacctaaagctttatgataaattaatctattatgggtattaatgtagatgaaacaatgtatgggatcattctttgtaaacagtacagttttatacagttgttatcttattgccaggttggctaattctaatgccaaatggtaacatgcttttccttggcatgctagctgctgactgacccatggcgctactaatattcatgctaagtcataccccatattggcctgccattcttttcagctctgctatttcagatctctgatagaacagtctgaagaatgtgataatttctgaataaaaattctgggatacttgaagtctataataaagactgaagacccattgttcctagtacctagatagtacatattggtggagaatattgtctgtaataattcttagcaatttctctaactgttttagacagaataaagtaaatcttttaattactactaagatagtaagtactttattgtctctagatgtacaaaagtgtgaaagattggtccttgtccacatcaaatctcagcctaaaattaagaggccctaagaatctctttcagctatatctgtaggacctgttttacctttccactctgcttttaatattttagcagaattgtctcatttgatgcttgttcccatttgcaaattatgatgctgggatagacattcctaggctcagtggctggagtgaagagatgctaaatcccagggttctaatggatatctttcatagctagttctgaaatccttgaaatgtgacctcttttagaaagaagtagaacctgtggaggcaaatggggaaagtcatcacaaatgcttatattgcttaagttctcttactagagcaaggaagtgcaaaggtggggctcctgtttcctttattgaaatatggttatgcagtagaaaaacataatttttggttggaccccagacagtttttgttttccgtttttcagttaattaaaattgtggagtatagtgggctttttgtggtggtggtgttagagatggtcttgctgtgtcgcccaggctggagtacagttgcatgatctcagcttgctacagcctctgcctcctgggttcaagggattcttgtgcctcagcctcccttgtagctgggattacaggtgtgcatcactgtgcttggctaatttttgtatttttagtagagatggtgttttgccatgttggccaggcggttcctgaactgctggcgttgagtgatctgcccgcctcggcctctcaaagtgctgggattacaggtgtgagctaccatgcctggctatttatttatttatttatttagagacagggtctcgctttgtcacccaggcctgaatgcagtggtgcagtcttggttcactgcagcctcgatctcccgggctcaacggatcctcccactttagcctcctgagtagctgggactacagtgccaccatactcggccactgttcttaaaatctatgttagtttattaatgatccttgttttgtaagttagacgtgagattttgcaagcagcttgtttagtggaattttaaattcagagtccttgaaatctttttttggtgttatggttttgacttggataatatagggaagagtcagactaggtttgaaataacgtatgctttttatcttctcttgagacaattggattataaaaatgtgttcaataccttggattttaacctttctggatctcttcatttagagttgaagttcaaaagactgattctgtttttaggactgctaagatacaggtaaagaaaatttattttacaaatgagggagagaataacttatggtaaggtttatagtcaacttgaaaagttgtagttaagattagcatagattttttgggggtggggcatgatcatttagaactcagattagattaaactaggttttcagcaaatatacctaagatttattttactgaggggtgagacttgaaggcagagtttgaaagctttgaaaactgcttttttgtattggcttatgctgggatttgtatgcatttaaagcatatataattctgctgtaaataaaaatggtggtgctgacaagatttgagttatttcttttcacaagtggttttgaatttggggtgattaaatcatgccagtttgagtgttttaccttggacctaaagacagatgttcaagatagctgaccatgataaatatagactgcctgtatctcaccgggctgtcttatgaaggaatcctcattgcttttgaatctgtcatgaatgccatcttttattattattattattatactttaagttctgggttacatgtgcagaacgtgcagttttgttacataggtatacacgtgccatagtggtttgctcacccatcaacccatcatctacgttaggtatttctcctaatgttatgcctcccctggatgcccatccgccacagaccctggtgtatgatgttcccctccctgtgtccatgtgttctcattgttcaactcccacttacgagtgagaacatgtggtggttggttttctgagcttgtgatagtttgctgagaatgatggaatgatggtttccagcttcatccatgtccctgcaaaggacatgaactcatccttttttatggctgcatagtattccatgatgtgtatgtgccacattttcttaatccagtctatcattgatggacatttgggttggctccaagtctttgctattgtggataatgctgcaataaacgttgtgcatgtgtcttcatagtagagtgatttataatcctttgggttatgccgagtaatgggattgctgggtcaaatggtgtatctagttctagatccttgaggaatcgctacactgtcttccacaatggttgaactaatttacactcccaacagtgtaaaagcattcctattttcccgcaacctctccagcatctgttgtttcctgtttaatgatcgccattctaactggcataagatggtatctcattgtggttttgatttgcatttctctaataaccagtgatgatgagcattttttcatatgcttgttggctgcataaatgtctttttttgagaagtgtctgttcatatcctttgcccattttttgatggggttgtttgcttttttcttgtgaatttgtttaagttctttgtagattcgggatattagccctttgtcagatggacagattgcaaaaattttctcccattctgtaggttgcctgttcactctgatgatagtttcttttgctgtgaagaagctctttagtttaattagatcctatttgtcaattttggcttttgttgccattgcttttggtgttttagacataaagtctttgcccatgcctgtgtcctgaatggtattgcccaggttttcttctaggatttttatggacctcggtcttatgtttaagtctttgatcagtcttgagttgatttttctataaggtgtaaggaaggggtccagtttcatttttttgcatatggctagccagttttcccagcaccatttattaaatagggaatcttttccccattgcctgtgtgtgtcagatttgttaaagatcagatggtggtagatgtgtggtgttacttctgaggccgccgttctgttccattggtctatatctctgttttggtaccagtaccatgctgttttggttactgtagccttgtagtaaagtttgaagtcaggttgcataatgcctccagctttgttcttcttgcccaggattgtcttggctatgcaggctcttttttgtttccatatgaagtttaaagtagttttttccaattctgtgaagaaagtcagtggtagcttgatggggatagcattgaatctataaattactttgggcagtaaggccattttcacattattggttcttatccatgagcatggaatgtttttccatttgtttgtgtcctcttttatttcgttgagcagtggtttgtagttcttcttgaagaggtccttcacatcccttgtaagttggattcctagatattttattctctttgaagcagttgtgaatgggagttcactcatgatttggctgtttgtctgttattggtgtctaggaatgcttgtgatttttgcacgttgattttgtatcctgagactttgctgaagttgcttatccccttaaggactttttggcctgagacgtcaaacagagacactttgacttcctctcctcctgtttgaataccatttattgctttttcttgcctgattgccctggccagaacttccaatactatgttgaataggagtgatgagagagggcatccttgtcttgtgtcggttttcaaagggaacgctttcagcttttgcccattcagtgtgatattggctgtgggtttgtcataaatagctcttgttatgttgagatacgttccatcgataccaagtttattgagaggttttagcatgaaagtctgttgaattttgttgaatgccttttctgcatctatggagataatcgtgttttttgtcgtcggttctgcttatgtgatggattatgtttattgatttgtgtatgttgaaccagcctgtcattccagggatgaagccaacttgatcgtgatggataagctttttgatgtgctgctggattcgatttgccggtattttattgaggattttcgcatcagtgttcatcagggatattggtctaaaattctcttattttttgttgtgtctctgccaggtatcatttggtatcaggatgatgccgacctcataaaatgagttagggaggattccccttttttctattgatcggaatagtttcagaaggaatgataccagctcctctttgtacctctggtagaattcagccgtgaatttgtctggtcctggactttttttgttggtaggctattaattattgcctcaatttcagagcctgttattggtctatccagaggttcaacttcctggtttagtcttggaagggtgtattctccaggtatttatccatttcttctagattttctagtttatttgcgtagaggtgtttatagtattctctgatggtattttgtatttctgtgtgatcggtggtgatatcccgtttgtcattttttattgcatctatttgattcttctctcatttcttctttattagttttgctagtggtctatctattttgttgatcttttcaaaaaatcagcctctggattcattgatttttttttttttttttttgaggtttttttgtgtctctgtctccttcacttctgcttggatcttatttatatcttgtcttctgttagcttttgaatttgtttgctcttgcttgtctagttcttttaattgtgatgttaggatgttgattttagatctctcctgctttctcttgtgggcatttagtgctctaactttccctctaaacactgctttaaatgtgttccagagattctggtatgttgtgtctttgttctcattggtttcaaataacttatttctttttgccttaattttgttacttaccaagtaggcattcaggagcaggttgttcagtttccatgcagttgtgtggttttgagtgagattcttaatcctgagttctaatttgatagcactgtggtctgagagacagtttgttgtgatttctgttcttttacatttgctgaggagtgttttacttccagttatgtggtcagttttagaataagtgcgatgtggtgctgagaagaatgtatattctgttgacttggggtgtagagttctgtaggtgtctattaggtctgcttggtccagagccgagttcaagtcctgagtatccttgttaattttctgtctctttgatctgtctaatattgatagtggggtattaaagtctcccattagtattgtgtgggagtcttaagtctctttgtaggtgtccgaggacttgctttttataaatctgggtgctcctgtattgggtgcgtatatatttaagttagctcttcttgttgaactgatcactttaccattgtgtaatggccttctttgtctcttttgatctttgttggtttaaagtttttttttatcagagaccgggatttttttttttttgctttccatttgcttggtagatcttcctccatccctttattttgagcctgtgtatgtctttgtacatgagatgggtctcctgaatacagcacactgatggatcttgactgttcatccagtttgccagtctgtgtcttttaattttggcatttagcccatttacatttagggttaatgttgttaggtgtgaatttgatcctgtcatgatgctagctggttatttcacccattaattgatgcagtttcttcttagcatcgatggtctttataatttggcatgtttttgcagtggctggtaccagttgttcctatccatggttagtgcttccttcaggagctcttgtaaggcaggcctggtggtgacaaaatcctagcatttgcttgtctataaaggattttatttctccttcacttatgaagcttagtttgactggatatggaattctgggttgaaaattcttttctttaagaatgttgaatgttttcccccactctcttctggcttgtggggtttctgccgatggatccgctgttagtctgatggccttccctttgtgggtaacccaacctttctctctggctgcccttaacattttttccttcatttccaccttggtgtatctgacagttatgtgtcttggggttgcccttctcgaggagtatctttatggtgttctctgtatttcctgaatttgaatgttggcctgccttgctacgttggggaagttctcacggttaatatccttaggagtggtttctaacttggttccattctccccatcactttcaggtacaccattcaaacgtagatttggtcttttcacatagtgccatatttcttggaggctttgttcatttcttttcactcttttttctctaatcttgtcttctcactttatttcattaatttgatcttcaatcactgatatcctttcttctgcttgattgaatcgggtattgaagcttgtatgtgcttcaccaagttcttgtactatggttttcagctccatcaggtcatttaagctcttctctacattgtttattctagttagccatttgtctaatgttttttcagggtttttagcttccttgcaatgggttagaacatacttctttagctcggagaaattttttgttattactgaccttctgaagcctacttctgtcagcttgtcaaactcattctgtgtccagttttgttcccttgttggcgagtagttgtgtttctttggaggagaagaggtgttatggtttttggaattttcagcctttctgctgtgtccccatctttgtggttttgtctacctttggcctttgatgttggtgacctacagatggggttttggtgtggatgtcctttgagttgatgttgatgctattcctttatgtttgttagttttccttctaacagtcaggtccctcagctgcacgtctgttggagtttgctagaggtccactccagaccctgtttgcttgggtatcaccagcagaggctgcagaatagcaaatattgcagaacagcaaatattgctgcctgatcttcctctggaagtttcgtcccagagggacagctgcctgtatgaagtgtctgtcggcccctactgtgaggtgtctcccagttaggttacacgggggtcagggacccacttgtagaggcagtctgtcagttctcagagctcaaacgctgtgctgggagaaccactgctctcttcagagctgtcagatagggacgtttatgtctgcagaagctgtctgctgccttttgttcagctatgccttgcccccagaggtggaatgtaaaagaagcagtaggccttgctgagctctggtgggttctgcccagtttgagcttccctgctgctttgtttacactgtgagcatagaactgcctactcaagccttagcaatggcagacacccctcccccaaccaagctcctgcatcttaggttgatctcagactgctgccctggcagtgagcaaggctatgtgggtgtgggacccgccgagtcaggcatgggaggggatctcgtggtctgctggttgcgaagaacatgggaaaagcacagtatttgggcaggagtgtatcactcctccaggtacagtcactcatgctttcccttgggtaggaaaaggaaatcccctgatttcttgcgctttctgggagaggcgacgccctgccctgcttcggctcgccctccgtggggtgcacccactgtccaaccagtcccagtgaaatgaaccatgtacctaaggtggaaatgtagaaatcacctgtcttctgcatcgatcttcctgagagttgtagaccagagctattcggccatcttggaagcaaccataaatgccatcttgcaaacgaaggtgttaattggtcgcagacattcactggcttttgtgtatattaatacttctgtgaatttaaatggatataaatattggttataatatcttattagtgcatttggatattcatttatctagcaatttatatttcacagagaaaaatactcataaatattatattacttttattaggttagttggaattcagttagtattttaaaatgaaaattgtcataatggaagaataacaggaaaaagtaaaagtccaataagtgagcctaaggacttatattgtactgagaattggttttagatttgtcagggaagagagaagaaatagtagacatttttgtgtacattgaagtcactaaaagaacaatgtaaagctcttttagatcagatactaggtagcataattcagagaatcgattaagaattcagaaaacaacatggtgactgtggactgtgcctggtcaagtaggaggtggctcttgtgcctcaattgaagaaagcctttgaattgctactagggatgagagaaggcaaaaaagggaagaagagagctatgagtaaatagagaccctggagccagtaatctgcttgtaattgggcctcagttcagaatggattggattatttaagttttatatctgttaaccccaaattaacattcttttcttaacctgagctttctctgagaggtcttctactttgtgaaaaagattattcagggaacttaaaactcaaagccttactttcctaaacgcagaaggatctgaagagagtcagaattattaaacatttttatttgcacacattttattttcaagtaaaataagatcttgagaaaagccctaagaccttttagaattggatggataaggtcagacttttatgggctcacaatttgctatttgaccatgggcaaatctaacattcttcctattacctataatgtgggaacagtactgtctacctcataggattgaaactaagcattgtgtttggtctgtggaatgactaaatacatgggagtttaaaaaatgacttataatcaaaacaagtaattgaagtaattacatgtgataaacgaaaaataatttgtagtaaagaatatggtttattttggccaggcacggtggctgatgcctataatcccagcactttggaggccaaggagggcggatcacctgaggtcagaagttcaagaccagcctggccaacatggtgaaaccgcgtctctgctaaaaatacaaaaattagccagacgtggtggcaggtgcctgtaatcccagctactcgggaggttgaggcaggagaattgcttgaatctgggaggcagaggttgcagtgagccgagattgtgccactgtacttcagcctgagtgacaagagtgagactccatctcaaaaataaagaaagaaaaaaagaaagaaagaatttagtttaccttgtatatgttggcaattttctctatttaattccttatagttctcattaaaaaaaatttttttttcctttcttccgttaggagacaaggatggcagcaaggtgaccacagtggtagcaactcctgggcagggtccagacaggccacaagaagtcagctatacagacactaaagtgattggaaatggatcatttggtgtggtgtatcaagccaaactttgtgattcaggagaactggtcgccatcaagaaagtattgcaggacaagagatttaaggtaaaacgtctggtatttcatgtattttgttgctgtcataatacatgtaccataaatgattattttttggttgtttctttttgcttcaaatttcttctattgtgcacatttttgtccagctcaagcattacaatgattttatttctagtcgtgtattttgtagagagaaaattcactgaagattgcagtattacttttgtagtcattataaatgacatatatatataaatcctgtgaaaggtaagttaaaatttcttaatttatactttaaaaagtgacctgtccccacccttgtactgtgttgatgtagaccagaggaacactgcctgtagcatataagtattttgtgtagtttcctatgcttcctttcttgaaaaaaatttttttaattcatgatgcaacttgtgttagtctatttttgcatctctataaaggaatacctgacgttgagtaatttataaagaaaagaggtttaattggctcacagttctgcaagctgtacagaaagtgtggtgcagacatctgcttctaataattgtctcaggaagcttctaatcacgggcagaaggtgaagggcgagtaggtgcatcacatggtgagagctgagccagagcatgaagggggagatccagactttattattatttttattgttgttattattttgtagaaacagggttttgccatgttgtccaagctagtctcaatctcctgagctcaggcaatttgcctgtctcagcctcccaaagtgctgggattacaggcatgagccaccatgcccgtccccagactctcttaaataaccagatctcctgtgaactgagtggaaactcactcatcaacaaggggatggtgctaacccattcataaggggttgacccccttgatccaatacctcccaccgggctctacctccaacactggagattacatgtcaacatgtggtttggaaaggggtaaacatccaaaccgtgttacaacactattcatttttcttgtaacttttttttttttttgctatcttcctttttcttgtccttctgcctctagacactagcaatcccaaggttcagttcttgtcatctcttttctttttctgtacctcattaggggagcctatgcatggaagctcagatgttatctctacgttgtggtatagcagagagagccagaagacactggctgctgtaattaagcctctgccactatgcagcattgctccctttcctacccttcccacctctgcaacattttattgagagcttcctatgtgctaagacctatggtaaacatgaaggcatataataataagaagtgatcactgttctgttctaacaccagttataccacattctggtgtccatctgctgtaaatgtctagaacgttctaaagagttttaaaaaattcagttgtttttgttttcagttctcacctctcccccaagcactagtcttatgttgtcaaatgcccactggatcttgatatctgaatgttgtactgctatctcagattggcaagccatcttatctaaccacggcttaacttttaagactcaatggaaatctctcctactggttcccagaactttggatttgctttttctttttaatggttttataattcactgttattcagactattctattcgctcatccctaatatccagtcattgtttaacttgattttcttttttcctcatactgtcttgtggctgtgtctcttctttttctttctcttcactactattcttgtcagaccctgtcattatttggcttaaccacttataaacgtctaccttagtcttctcctttctaatctcttctgcatactaagactagaataatcccagaggtttcactggtcatgttgtttctcttgcccataaatcttctatggctcttcatagtctagaaagtaaaacctacctattttacttgtgtactcagaaacttccatagtcttccattttctccagatacttaactttccaaactttttatattattggccttgaaatatgttcttctctatgaccactctgcttttattcagcgtttctatcactcccattctcctgctatgtaaattctgtgcatctgtgaaaactcaggtcaaattcttcctgtatgaaacttaccagatgattcaagtcagctacggagatcttgccgttctaaattccttgagcccttattgtccataaactaggaaattccacattttttatgacagcatctctattttttaaatatttgtctcctaaatacccacacattccattttgggggattagtagttgatgatagcaaatacttgcttattatatgtattttttgacatgtgtagttttacataattcttaccattagtactgtgtgattgatactgttatcatttggataaggaagcctaagtacaaagaaattttaaattaacttgtccagggtcacacagttggcaagtggacggatgggcaaagattcgaatctggacagactctgcagtgccttaacacattttatcctcactgtatcaaacccctctaccccttctctctttctctcacagtattaatcctctttctatatcatagtatcagattctcagtgtcatacctctttctatcaaagtatttaaaccacaccctctttctccttctcaagaaagagagagattggttttatttcattctctcatggttgcattatattttattgtgtggatataccctaattagccattgttcaattgatagctattaaaaatttttttccctaccaaacagggtatatatatgccttatcagaatacagtttataaaagtagaattctagggttgaagagtaggagagcactttaaaccttgatataggctgccttctagttagattttatccatttaaatgtaccttatttgaatatgagtaatgcccatttcctgtgtagcctttagatattaggagtatttttatgtttttcaattctgtaggtgaaaaattatttttgttactttcttttctgttttaaattttctgtagagatgcatctcactacatggcccaggttggtctcgagctcctggcctaaactggttctccctcttggcttcctaaagtggtgggattatggtctgaatcaccatgcctggccctgaaaaatttttttaatttacaacatcatttttcatgttgtgactctttttacccccttttagagtgtgtgtcttccttactcatttgttaaaacccatttaaaatgtaatagtgtagagcaacaaagattttattatctcagtgcttctgtgcgttggaacttcaggcatggcttagctaggaacctctggcccagggcctctcaccagacggtaatccaggcatcagccagggctgcagtctcatctgaaggtttgtttgaaggaggaaatatctgtccccaagtgtactgtgtgatcgtcggcagactttggtcccttgccacacgggcctgttcactgggctttctgaggtcttgccagttagcttcccacatggcaagggatccactggaaaaatagtaagcccaagacagaaaccaaaagtttttttctaacctaatattggtgaggtgattagacaagggtgtgaataccaggaggcaggtatcatttagggccatcctagaagctgcctccacaataatatgagccatctgtgagaaaaaattatttgtttgtgttgactttgcttgtgataccttttgcttttcagatattgttgatttgggctttggcataatgctgagaaagggcctgttgtatcttataaataatgtcattttctctaggaattttattttgccatatttctttaatctttctggggttatattttgggatgtagtataaagtagtaatataagttaacctttccccaagtagtaggtcatttgtctcagaaaccatttttataaagtttatccttttcccactggtgggcaaatggcattttaaaaaccatgtattatgttaccgtatatacactggattttcttctgggtttccttttcttttccactgatttgtccattttggcttatgtaacacttctctgatgatgagaactaacagcgtagtttgagtgttaacaaatgagtatttctcttaataaatctgtgtatcaagtatcattagcctgtgatgtttctcctgcaacctcaacaaaacaaaaacaaactttagatttgattaaaatcgtgtaaaatttgcagattagttggacagaatgtacagatttacaatattcagccttcccatccagaaatgtgataattctctgcattaatccaatttttgatgtaaaactttataattatgtaggttttaaacttttcttacttattttatctagttatgtgtagtaatttttttgttgctcttgggaatgggagtctttctccatgcaaatacatcttatatgtaagtacaagtcttcctccatgtaaatacgtcttgttttaaccatttgaacactgcctcctccgtttgttttgaacttgggcatcttctagatgcatttaatgtgctgatgccctttaggagggtactttactatgttgcttttctcaatattattacatgttcattataattttcttccagcctgggggacagagggagactccatctcaaaaaaaaaataaaaataaataaattatttctggcttaggccgggcatggtggctcatgcctgtaatcccagcactttgggaggcccaggcgggtggatcacaatgtcaggagatcaagaccatcctggccaacatggtgaaaccttgtctctactaaaaaatacaaaaattagctgggcatggtggctgaggcaggagaatcacttgaacctgggaagcggaggttgcagtgagctgagatcacaccactgcactccagcctggtaacagagcgagactccgtctcaaaaaaaaaaaaaaaaatatatatatatatatatatatatataaaatttcaggcttaacattgccattactatacataatttccttttatccagatttccttttatccagatttccaaatactaatatttatcacactcacttttacagtttcttcctctctatatatattatttttatgtttttcaggtaaggtcttgccatataacccagctggagtgcagtggtatggtcatggctactgcagcctccaactcctaggcttagtgattctcctacctcagcctcccaaatagataaccataggtgtgcgccaccacatccagctagttttgaatttttttttttctgatagagacaatgtcttcctgttttgcccaggctggtctcaagctcctgggcttaagtgatcctcctgacttggcctcctaaagtactgggattatagatgtgtgtgcctggccgcacatattatttcctgaaatgtttgaatgcaacttttaagtgtgaggctcttttatccctaaattattcagtgtctgtttcccaaactcagagacatttgcttatgtaaccacataataattattttaaaaatcaagaaattaacaattatacaatagtattatctaatgtgcaggctttattgaaatatgtccagttgttccaaaaatgtccattgtagcacaagaaaatcctgggtcatgtgtttagttgtgatatctctagtcttctataccaggaagagttcctcacttgctgtctttcatgacattcatgtttttgaatagtataggacagctatttgggtttgtgtaatgtttcctcataattaggttcagcatattcatttttagaaagaatatcatagaaatgatttttttcttcttaaggcattatatcaggagacccatgatgtctgtctgtctagttaatgatgatattgacttctgtcacttaaggtagtgtttgctaggtttctttactgtagagttactgtttttctcttcatcattaataaggaatctgtagggaaatacttttagattatgtaaataacctttttctcatacagcttttaccaacttgtttcagtatgcattaatgagcttttgttagaatcagttatagtaatggctacaaatggtaattttctaattctttttttccttctttatttattaattagattctactgtaaggattatgaggaaagcttttcccttctctcatttatttgtatatatcatatggactcattgactcttattttattaaatgggttataatcttagtcatttattttgatacccagattgcttcagtccaggcgtggtggctcatgcctgtaatcccagcactttgggaggctgaggcaggcggatcacgaggttaggagattgagaccatcctggctaatatggtgaaaccccgtctctactaaaaagtagaaaaaattagccgggcgtggtggcgggtgcctgtagttccagctactagggaggctgaggcaggagaatggtgtgaacccgggaggtggagcttgcagtgagctgagattgtgccactgcactccagcctgggcaacagagtgagactccacctcaaaaaaaaaaaaaaaaacaaaaaactgcttcagatttggccagtgaaagccctttcaagctggatctagatcctcttagccaacagaacttagacaataggtgtatgtgtgtgcacatgcatgcaagcatattcacacgtgtttttttctgtatttctttttattaaaaattaatacttttaattgcagagcaacatcacagagttcactctagccttctgtatttctatatttgtaactcttctttctgaagtgagaaaacctgactgctgtcatccacaatatatttactttatttgctcaatcctagaatttacaaggtagtttcagaactgctaactcatacccctgggggcagagttcagtgcttgtgtgttttttatctttagtttgaaaggcatatggattttatattatattcaaaaagtatttggatttttctgttttttgtaattttaaattttccctacagcattgactattaatttgaagtagttagattcatctgtttctgtatgtatcacttcttagaacttcgcccccattctttttgattaaaaaaaattatttatgttttcactctgtgaaacactaatatggttccaaaagtcagaaatctagtgtagtttcttctcaattctttctgttttatttccactcgctccctgtaggtggccaacctcattatgttctggcttacttttcctcagttttgttttacacatacctgttcatttatgcattttttttcttccttacacaggaggtagcatattggagatactcttttgtactttgctttttctttaagttatatttcctggaattcattgcatatcagttcagagatttttttttcatcctttttacagctgctaaatgcccctccataaaggttataccaatgtgcattctctctagttaagtatgagtgcctgttggcccatagttttggctataaaagttgccttactttttaaattttttgctaatctcataggtgagaaatggtatctcattgtagttttaatttacaatcttcctattttgagtacacttaaacatcttttcatgtattcaaggtccattttatttgtttttgtgagtctgtatgaattgtcttttttttggcccattttaaaaatgcgattttggtttttcccaatcaaccctgaagagtcctttattatggaatttatacttaggtgtgatatatgtaatttttactttgtgtatggtaggttttttttgttttgttttggtttttgttgtgtaagagtcattcctcccctctatgcagttgaatttattgctcttttatctggattttgtgttattataaaactttcctgctatcctcaggtaagtcatctatattttcctctagtagttatcagggttcagtttttgcatttaaatccctgatacatttggagtttattcctatgtgtggtatgaattataatctaattttatcttttctaaatcattaactacttgtctgggtacaatttagtagaaagactatctttgttccagttatttgagatgttactgttactatatgctaaatttctacatgtgctcggctctatttctggactttccattttattccgctaggctgtttgcatattcctgtgtcactactataccgttttgattatagaggcttcatagtatgttttcatgactgatagggttaatctgccctcgtagcttttctttttggtgttttcctacctatttttacatgtttatttttctgtatgaactttggcatcagttcatctaactttataaaaaaaagtgttgatcttttaaattgggatttatttataaattaatataggaagaactgatatatttgtgagcttgaattatcttagccaggagtaagaaatatttttccatttgttcaaatctacttttatgtctttcagaagttttggcttagactttagacatttcttaagtttatgcttaagtattttattttattttttgttgctattttatagtttttcttgttttttattccacatgttaaaaagtgatgggctgctttataccaagctcagttttttccttgtatcacccttcctttgtggaatttaagtattctttgttgtggccaaaaaataaaatttgatatgtcgacctatttgtttctcttgattatcataaaataggaatttctctgacaacttagaagtctgtagttttaacatctgtgatttacatagctgctacttgggattgccttaaataattaggtgtttccagcagaaggttgaaataggatctcctccttgttcaattaaataaaccaacctgcaaaatctcctaatggcagtgagaagcaatttttttttttttttttttggtgaatagaaaagaagagagataatggtcaaagataaaaagaaaaccaagaataattatcctggtgtgccagtagtcacataaactgtacctaagacactgggctttttaaaagaatttctggtataataagcttcatttcagtggtattttatttttttctcactgtggtccatcatactgtgacagaatgctagaaccaccttaacttgggcagtttggaagtgcttgtgatagaaaatgtttgtattgtggggataaagattgggtaggtacctaattaatgtaggagacctgtactgttgtcacagggaaaacatcagtcaatcccaaaacctccttatggttgttgaggctgactgttccaacttgaaaatcggtaagttgcatgtttattagtgctactggcttaatttaattcatttctcctttgaagaaagtcataggtttcaagtctcctgcctagtttcacttgttctgtaattgggatatagagggatagggatgtgaggtatcactattgttaggttgtgaatggagagcatagtctacttttaataccattttatttatttatttattggagacagagtttcactcttattgcccaggctggagtacaatggcacgaccttgtctcactgcaacctccgcctcctgggttcaagcgattctcctgcctcagcctcccgtgtagctgggattgcaggcatgtgccaccacacctggctaattttgcatttttagtagagatgggggtttcaccacgttggtcaggctggtctcgaactcctgacctcaggtgatccacccacctcagcctcccaaagtgctgggattacaagcctgagccaccgtacttggcttaataccattttaatacctgcttttatagcattttggagagtgaggagagatgatgtctgtttttgatccttaaggatatgagtattctctgaatatattctggagaaagcaccagaggaagattttggtctactgcttacttagtaattttgaaagcttgagcatatctattgtgagagttaaagaaagaggaaagaaacatgaaatgcggctggcagttaaagacaggttcactttagacaaaacctgacaggtgctcctggctgattttggtcaggagcgctttctgttacagattaagaatatatattggttttagggcgaggggcttatcacaagcttggaatgtttatgtgtgtggagaagtttatggtggggttggaatctctctgggaggaggggaagttatcttgaggcagacatctttctggcgaggaggggtgttatctcggggctagcatctttccggctggaggggggtttatttcggggctagcatgtctctggtcagggagaagtttggaatgtttctgattggagatgttatttgtggtttatggtcgtgctgaccttagccattaggctgatgccctttggatttaggcacttttttattaaggtgaattttagaatgaggggcttgtccaagatggcagtgctcctgctctgtcaatccagaccttatagtttgaggagggacggcatgttcttctggctacttcctgctgactagaggatggagagttttctggtctcgggttgactgtaggagcaatgacatctgtagatgttttcgggtagttgtctgtgaaatggccatgatcctgtcagataaaaatctttgaaaaaggttaattaggcagagtaagaacatcagtcccatgcatattattagaaggggccccaggaatgggatgacacatgctatgattttgtttccaaaccaagaatctgtttggttttgatatttccttagctttttatttcctgttttttttttgtttgtttgtttttgttttgtttttgttttgtttttgtttttttttgaggtagagtcttgctctgtcacccaggctggagtacagtggcgtgatctcagttcactgcaacctccagctcccaggttcaagcagttctgtctcagcctcccgagtagctggaactacaggtgcctgccactacacctgggtaatttttgtgttttttaagtagagagggggtttcaccttgttggtcagggtggtcttgaactcctgacttcaggtgatctacgtgtctcagcctcctaaagtgctgggattacaggcgtgagttactgcgctggcaagatctcttatttctttacattgatatttatgactttttgggggctgtcaggggttgctttcttagctttccaggcttttacttgagtgtgatatatttatttaggagctcattcctgtaacaggtaccgttttaattaccctgggttctgtggattcactagacgtgggggtgaaggattctgggcatcctcagttcttagttgtcagcaccagcagtgaagagatttccttctgtgatggttgggggagcttagaggcagcatctgctgaaacatctagttttcagtttatggagctttaagaaagcccagtttattttagaaacttgtagccagaaaattagaattcaatttaaaaagtagaaaataataaaaactgaaaaatattaggcaacactagaatttaacaacaggtgtgctatggtttttgcaatatgattttctctttccagtttcccatttttattaaaagacatttaaatcatggtaggaatagtttgctttattatacttggcttaattatttgcatacagtgcagcaagaataattatttgttacataggccttttaaattggctttgatggaactttgttctgtagaaggaatctgagagaaaaccttttaaagccaagcccaatcctggatttgtactatcaaatacctatgagttggtgaatttctctcctcttgaggtcccaagataacttgggattcctggcctagaatgtcactagaaagtgacattctttacttgctgcagaccagaaaccctgtacagggactgtgtacacaaaatatgaggccagttttccgagggcatttttggcttcataagtatggttccttaaaggaaagcatattattccaggttaagcctttttaaaataaccagtttttccaattctgtcctgttacaaaagaaaacagatttttagtgcatttatgcaaatattgtaacttaagaatactcacagatagtttaaaaattctggagaaaatcaggtagagagaaacaagtatgttccaaattttgttcatgggagtatactaaattgttaaaagctgttaatagctcaaaagaaaaatttcttggactttgaaaagcaaaacaaaggattagcaatattttaaaacattaaaagattagtctcctgttagtttagttcatgcaattaattcctgttgtgcttaatattaacattttatctcttcaaaagtcctgaacgtttttcctctattctgatgttacagtttccagagttatcagaaacctgcatttaagagcacctgttagagctttatagctgattataaaaccaccttttaaagaggaccaaagcaaggcaacaattgtttatggatgataaaaagttttagggtagccataaagacacatttgacaaggatggcacacaataattttaatgtaatgattgtaattattactgaacgtacactaatatatatcaaaattatatgagtctcccataattttggaacacatataaataacataccaatatagaccaaagaaagccaaataccattttatatttgacaatgctttctgtatgattttataccagataagctaaatttcacttttatatttgtcctattaatgttaaactcaattttaataaaaccttgtagacatatttatccaatattaatatctgaccataaaaccttgtagacatatttatccaatattaatatctgaccataaggtaagatttttatagactctttaaccttttataatttttgttaaagaataggttagtgctttaagaaaaacccattgtgcttttattttaatgcccagtgtacagaaaaactggatgatacccctttaactttaccaacatgtttacacacagaattccctttataattaacatttcaaaacttgcttaaaccttcaaaacaattttttaacctttcaatgtaggtaaaaatccacatttttatgcctccttataatccttttacaaaaagtatattttactttccttacacaccttgcacataaactgttttttcaatagctttaaatacatgttacactgttaacttttaaaaattattattatactttaagttctagggtacatgtgcacaatgtacaggtttgatacataggtgtacatgtgccatattggtttgctgcacccatcaactcatcatttacattaggtatttctcctaatgccatccctcccccagtcccccatcccagtgtgtgatgttccccgccctgtgtccaagtgatctcattgttcagttcctgcctatcagtgagaacatgcagtgtttggttttctgtccttgtgatagtttgctgagaatgatggtttccagcttcatccatgtccctgcaaaggacatgaacttacccttttttatggctgcatagtattccatggtgtatatgtgccacattttcttaatccagtctatcattgatggacatttgggttggttccaagtctttgctactgtgaatagtgctgcaataaacatacatgtgcatgtgtcttgatagtagcctgatttataatcctttgggtataaacccagtaataggattactgggtcaaatggtaattctaattctagatccttgaggaatcatcacactgtcttccacaatggttaaaccaatttacactgccaccaacagtgtaaaagtgttcctgtttctccacatcctctccagcatctgttgtttcctgactttttaatgattgccattctaactggtgtgagatggtatctcattgtggttttgatttgcatttctctgatgaccagtgatgatgagcattttttcatgtgtctattggctgcatagatgtcttcttttgagaagtgtctgttcatgtcctttgcgcactttttgatggggttgtttggttttttcttgtaaatttgttagagttctttgcagattctggatattagccctttgtcagatgagtagattttaaaaattttctcccgttctgtaagttgcctgttcactctgatggtagtttattttgtcctgcagaagttctttagtttaattgatcccatttgtctattttggcttttgctgccattgcttttggtgttttagtaatgaagtccttgcccatgcctatgtcctgaatggtattatagcctaggttttcttctagggtttttatgttttttggtctaacgtttaagtcttttatccatcatgaattaatttttctataaggtgtaaggaaggggtctagtttcagttttctgcatatggctagccagttttccaagcaccatttattaaatagcaaattgtttccccatttcttgtttttgtcaggtttgtcagagatcagatggttgtggatgtgtggtattatttctgaggcctctgttctgtttcattggtctgtatgtctgttttggtaccagtaccatgattttttggttactgtagccttgtaatgtagtttgaagtcaggtagcatgatacctccagctttgttctttttgctaaggattgtcttggcaatgaggcctcttttttgatttgatatgaagtttaaagtagttatttccaattctgtgaagaaagtcattggtagcttgatggggatggcattgaatctataaattaatttgggcagtatggccgttttcacgatgttgattcttcctatccgtgagcatggagtatttttccatttgtttgtgtcctcttttatttcattgagcagtggtttgtcgttcttcttgaagaggtccttcacatgccttataagttggattcctaggtatttaattctctttgtagcaattgtgaatgggagttcactcatgatttggctctgtgtttgtctgttaatggtgtctaggaatgcttgtgatttttgcacattgattttgtatcatgagactttactgaagttgcttatcagcttaaggagattttgtgttgagacgaatatacagtgttccaaatatacaatcatgtcatctgcaaacagagacaatttgactccctcgtttcctaattgaatgccctttatttctttctcttgcctgattgccctgaccagaacttccaagattatgttgaataggactgatgagagagggcatccttgtcttgtgtcggttttcaaaaggaatgcttccagtttttgcccattcagtatgatattggctgtgggtttgtcataaatagctcttactattttgaaatacattccatcaatacctcgtttattgagaatttttagcatgaagggctgctgaattttgttgaagggcttttctgcgtctattgagataatcatgtggtttttgccattggttctgtttatgtgatggattacgtttattgatttgtgtctgttgaaccagccttgcattccagagatgaaacctactggatcatggtggataagctttttgatgtgctgctggattcaatttgccaatattttattgaggatttttgcattgatgttcatcagggatattggtctaaaatttttgttgttgttgttgtgtctctgctaggctttggtatcaggatgatgttggcctcattaaatgagtcagggagaatcccttctttttctgttgattgaaatagtttcagaaggaatggtccagctcctctttgtacctctggtcctggactttttttggttggtaggctattaatagctgcctcaatttcagagcctgttattggtctagtcagagattcaacttctttctgatttattcttgggagggtgtctgtgtccaggaatttatccatttcttctagattttctagtttatttgcatagaggtgtttatagcattctctgatggtagtttgtagttctgggggattggtggtgatatcccctttatcattttttattgcatctgtttgattcttctctcttttcttctttattagtcttgccagcagtctatcaattttgttgatcatttcaaaagaccagctcctggattcattgattttttaaagttttattttgtatctctagctctttcagttctgctctgatcttagttatttcttgccttctgctagcttttgaatttgtttgctcttgcttgtctagttcttttaattgtgaagttagggtgtcaattttagatctttcctgctttctcttgtaggcatttagtgctataaatttcccctctacacactgctttaaatgtgtttcagagattctggtatgttgtgtctttgttctcattgatttcaaagaatatatttctgccttcattttgttacttacccagtagtcattcaggagcaagttgttcagtttccatgcagttgtgcagttttgagtgagtttcttaatcctgagttctaatttgattgcactgtggtctgagagacagtttgttgtgatttctctccttttacatttgctgaggagtgctttacttccaattatgtggtcaattttagaataagtcctttgtggtgctgagaagaatgtatattctgttgatttggggcagagagttctgtagatgtctattatgtctgcttgttgcagagctgagttcaggtcttggatatgcgtgttaaccttctgtctcattgatctgtctaatattgacagtggggtattaaagtctcccattactgttgtgtaggagtctaagtctctttgtaggtctctaaggacttgctttatgaatctgggtgctcctatattgggtgcatatatatattgaggatagttagctcttcttgttgaattgaacactttaccattatgtaatggctttgtttgtctcttttgatctttgttggtttaaactcagttttatcagagactaggattgcaacccctgcttttttttttttttttttttttttttccatttgcttggtagatcttcctccatctctttattttgagcctgggtttgtctttgcacgtgagatatgtctcctgaatacagcacaccgatgggtcttgactttttatccaatttgccagtctgtgtcttttaattggggcatttagcccatttacatttaaggttaatattgtcatatatgaatttgttcctgtcattatgatgtttgctggttattttgcccgttaattgatgcagtttcttcataacatcaatggtcttgacactttggcatgtttttgcagtggctggtactggttgttcctttccatgtttagttcctccttcaggagctcttgtaaggcaggcctggtggtgacaaaaatctctcaacatttgcttgtctgtaaaggattttatttctccttcacttatgaagcttagtttggctggatatgaaattctgggttgaaaactcttttctttaagaatgttgaatatttttcccccactgtcttctggcttgtggggtttctgccgatagatccgctgttagtcggatggccttccctttgtgggtaacccagcctttctctctggctgcccttaacattttttccttcatttccaccttggtgtatctgacagttatgtgtcttggggttgcccttctcgaggagtatctttatggtgttctctgtattccctgaatttgaatgttggcctgccttgctagattggggaagttctcctggataatatcctgaagagtgttttccaacttagttcctttctccctgtcactttcaggtgcaccaatcaaacgtagatttagtcttttcacatagtgccatatttcttggaggctttgttcatttcttttcactcttttttctctaatcttgtcttctcactttatttcattaattttatcttcagtgactgataccctttcttccacttgatcgaatcggctattgaagcttatgtatgcttcaccaggttattgtactgtggttttcagctccatcaggttatttaacgtcttctctacactgtttattctaggtagccattcgtctaatcttttttcaaggttattagcttccttgcaatgggtttgaacgttctcctttagctcagagaagtttgttattaccgaccttatgaagcttacttctgtcaactcgtcaaagtcattctctgtccagcttttttctgttgctggcgaggagccgtgatcccttggaggagaagaggcactctgatttttagaatttttcagctttttgctctggtttctccccatctttgtggttttgtctagcttcattctttgatgttggtgacctacagatggagttttggtgtagatgtcctttttgttcatgctgatgctattcctttctgtttgttagttttccttctaacagtcaggtccctcagttgcagatctgttggagtttgctggagttccactccagaccctgtttgcctgggtgtcaccagcagaggctgcagaatagcaaatattgcagaacagaaaatattgctgcctgatcttcccctggaagcttcgtcccagagggacagctgcctgtatgaagcgtctgtcggcccctactgtgaggtgtctcccagttaggttacacgggggtcagggacccacttgtagaggcaatctgtctgttctcagagctcaaacgctgtgctgggagaaccactgctctcttcagagctgtcagatagggatgtttatgtctgcagaaactgtctgctgccttttgttcagctatgccttgcccacagaggtggagtctagaggctgtaggccttgttgagctgtggtgggctccgcccagtttgagcttccccgccactttgtttacctagtcaagcctcagcaaaggcggatgcctctccctcaaccacgctgccacccgcagatggatctcagactgctgagctagcagtgagcaaggctccgtgggcgagggacccgtgggacccgccaagccaggcattggagagaatcaccttgtctgcgggttgctaagaccttgggaaaagcgcagtatttgggcggggagtgtcccatttttccaggtagtctgtcatggcttccgttggctaggaaaaggaaatcccccaactccttgcactttcctggtgtcgtgacgccccaccctgcttcagctcgccctccatgagctgcacccactgtccaaccagtcccagtgagatgaaccaggtacctcagttggaaatgcagaaatcacccgtcttctgcgtcgatcatgctgggagctgcagaccggagctgttcctatttggccatcttggctacactgttaacttttaataaactttacttttgttgaaaaccttataagtttgggattttaattatgtgctaggtatagagcccaggacctagacagaagtgcagataaggtctagcttgttctagcatttaactccagatgtcctaggttttacctagctgtaaagcaggccagttgtccagccaagagttatagtaacattttataaagcattcaggaggcctaattacttttaaattatacaacatttcttgtataaattcccttttataacgtttttcatgactttcacaatctttgacatgactcaactttctgacttgtaaatatccctttctttaaacaaccagttaatttaggacaagaatttaccatataagattctttttatgtaacttcccctttctttaatgtcaaagatgataaccattcttttccaaagcaaacttccttcatgttagtgtactagactgcctaagccacaagattagaagctaggatattttactacatagttgaaaatatagctatcttcattaaaccaatattaatgtttcatttattaaaaaattacgcaaggccgggtgtggtgtctcacgcctggaatcccagcactgtgggaggccaaggtgggcgaatcacctgaagttggggagtttgagaccagcctgatcagcatggagaaatgccatctctactaaaaatacaaaaaattagctgggcgtggtggcacatgtgtgtaatcccagctacttgggaggctgaggcaggagaatgacttgaacccatgagggcagaggttgcagtgagctgagattgtggcattgtactccagcctgggcaacaagagctaaactccgtctttacaaaaaaaaaatgacacaagcaaagatgattttgtttgggctgagttagttttgcagcttctatgcaagatgttgacaccttacagtatttggctgagaaaagtatgaatttgcctgattaacaaatgcgaacaaaaaggtatgctggcaacttttaagatacttcgaactttactgtaccagtaagttttaaagattaaagtcacgtgaactgaaaagtcccacagcttttacttttccctgaaaaatatttaagtgcttagttttcttaggccaattaattagagctcttttagtagacattgcacagacaacacatatatagccacacagacaaccaggagaagattcagtagttatgagattttttttttttcctctgctaatttcccaattggattattggcctttgagtgaggctcttgaagaacaggactaggaaaacaatttccagggtctaataaacaagtataactggaagacaaatacaaagattttgagagatacttatttacctctaattccacggtttccataaggaaaacaggtttttccccaaaatgggatttgtggcacttttctgttttcccaaggaatcccagggcaccagaagtcatttcacagttttttacacatgcaccaagattagcaagacagagtggagaaaagtaattcagttaactgaggaaaaaccttttccaggaaaataagattgataaaaagaaaaatataaaggccttttgaatatatttatagtgttgatccgcgacaagtcagacatggagaaagagacatgaacacgagcaatgcctttaaccccatccacttcccagagagggagaatggcagaggtggttttcgaatgggtaacaggtggagaaggaggagaagtggggtttgggactgaaggcttggaggcaggcagggccaccagagcagagggtttggacggtcttggaacagatgcagggggataagaatacagagggggttcatctgcagggtcacaaggagtttcggaggaaggagagacttggagagggtttttattaagaagattttatgagaggtacaagcttgacacagatagggttgggatttcaggtagaaatagaagaaggcctgaatatagagaacgtcttgccatttaccgttcctggttataaagttgttaagttcctggctgggcgcagtggctcatgcctgtaatcccagcactttgggaggccaaggcgggcagatcacgaggtcaggagctcgagaccatcctggctaacacggtgaaaccccatctctactaaaaatgcaaaaaattagccagtcgtggtggcggtcacctgtagtcccagctactcgggagactgaggcaggagaatggcgtgaaccctggaggcagagcttgcagtgagccgagatcgcgccactgcactccagcctgggtgacagagagagacgcagtctcaaaaaaaagaagttgttaagttcctgagaatttgcaagttagaggtgccattttcagaccattggctgtcattatctaaggtgttttggggccaggctatgttacattaaaagactaaacacttaaggcaagtttggcaagatcatggagccagcacagtggagagactgcaggaatgtgaattgtttggcacccgtgtggactggtgagaagaagccgagggtgtctgtttttgttcctaggtatccccaaacaaaagacagaggtctggaatcatctttctaaagaggacagtcaagctgagaagaaactgggcatccccaagatttcccctagcttagtcctgctggtcctccaagaactgggacggctgacttaacttttcctgggtaccgcaagaaagccaggggagggcagatcttaccagtcggctggattagtgtccgatgttggatgttgcggttggatttggcaaagggcctcctggactgcagctgcatgagggagagagagaggaaaaaaaaagggaggatgagggaaaagtgaagtaagagaaaagactgggcgggtggccagagaccctcaggatccaggaattaactcaggacgagctgccgttgcccactgcttcctgggttgcaagagagcctctgccgccagcactcatcacaggtttcggcaccaaatgtaagagttaaagaaaggaaagaaacacaaaatgcggctggcagataaagacgggtttactttagacaaaacctgagaggcactctggccgatttcggtgagaagcggttcctcttacagactaagaatatatattggttttaggacgaggggcttatcacaagcttggaatgtttatgtgtgtggagaagtttatggtggggttggaatctctctgggaggaggggaggttatcttggggcagacatctttccagcccagaggggagtttatttccgggctagcatgtctctgatctgggaggagtttggaatgtttctggttggagatgttatttgtggtttatggtcatgctgaccttagccattagggtgattccctttggatttaggtggtttcttattaaggtgaattttagaatgaggggcttgtccaagatggtgatattcctgctgtgtcatatgtgaaatttatgagcctcaatttcactgcctgtaaagtggggatggcactaatacagcaatgcccagcccaatgtttggtacataaaggaacttggtaaacattattgtgttgccttttttctcttctttagtgttgtgtgaatcaaatgaaacaaagttttatgagaacattttctaagttttaaaactccttataactaaactctttgtttttattcttaaggtactaagttactacacactgctatttgcgtgaattttttttccccttatttgtttcacttcctcttaaatttggtgattctattttcaggcacctaattattattattttatatagccatttaagtcacttgtaaaaaatctatttgctgataaaactgacagagaacttgaaagaaatagtaatctttgtgctatgtgtagcactgttctttaagtcatggaaatttgtagttttcaagtggaggctaaaattaggtggaagaaaagggaaggacagctacaagttggataggaaaagtgttgcattaaggatagctctaagaaagtaacagcatagcagtcggtcaagtcctcaaaccaaagttaccaagtcagaggagttcagttcttcctgggaaaaggtctccattaagtatacctgctgttctcagtcatataggctgggaaactttgcctgtccccagcaagagaatggatttgataggtcactggctgggaccactggcaatgatgttccttgcagtgggaaacctgagaggcaggttttcatactaagtttcattaaaactttcatacaaagtttcttaaggatacagactgttttattttacttttatactttcccaagtacctaggtagggtgataggtaagatacatttttaaaaatttaatggaattttcagggacttaacaaagattgatgtggaagagctgtattgattttgctgttaaaattatatatagttttattgcctccttgattattccactgagaaaaaatggaggcatgatatttggtatttgtggtcttgaatttcttctttctggctttcagtgtcttgaatggtttgagataaagagaaataaaacttgatataaggcatgatgtgctttttaagtttgctcactttttttgagtttactgttattttgtgtttatactgtttcagattcccatatatatctgaggtaaggtcaaaagcagtgttgaatatcaggagttaaagttactcttttgactagtttcactaaaacctttttttttttttgtaagtggtcagctgcttgatacatttatttataacaaccttattgagatataattaatgtgatgtatatttacccttttaaaggatataactcgttggttttagtatagtcacagagttaggcaactatcatcactctctaattccagaatgttttcatctcaaaaggaaactgtgtacccattagcagtcactccgtatcctttccttcccccaggccctggaaaatgctaatctactacctgtctatggatttgcccatcctgaacatttcaaaatgtggaatcacacagtgtacggtcttctgcgtctggcttctttcacttagaatagtatttttgaagttaattcctgttgtagcatgtctcagtacttcatttcttttatggctgaataatattccattgtatggacatgccacatatggtttatctgttcatcagctgatgaacatttaggttgtttaactttttggttgttatgaatgatgctactagaaatatatgtgtacaagtttttgtggggaagaaggttttcatttctcttgagtgtattcctacgaatggaatcacagggccataaagtgattaaatgattgacagtttgaagaaatattaacctattttctaaagcagctgtaccattttgcaatcctccaacaatgcatgagcattgcaatttctctgcaactttgatagtacttgttttagttttttattatacccatcctcgtggtgtgaagtggtatcttattgtcatcttaatttgcatttctgctgttctgtatcttttcatgtgcttattggtggtttttatgtcttcttggggagaaatgtctatttgaaccattctagttttacagaaaagtgagtggaaagtacagagaattgccatatatacactcattccaaccccatctccagagtttccaatattactgatgccttagtgtagtacatttgttacaatcaagataccaatatttatacttattattaatgaaagtttagagtttgccttatggttcactctttgtgttgtacagtctatgggttttgacaattgtatagggacatgtatctgccattagagtaccatacaaaatactgcactaaaaatttcctgaactacacctattcatttttcccttcccccaggcacttgataacaattgatcttttactatttccatggttttgccttttcttggaatcatacagtatatatagccttttccgattggcctttttttttttttacttagcaatatgcatttaaggtgcctgcataactttctgtggtatgatatctcatatctttttttttttttttttgagtcagagctttgcttttgtgccaaggctggagtgcagtggtccaatcttggctcactgcaacttccgcctcccaggttcaagcgattctccttccccagcctctcaagtagctgggattacaggcgtgcgctaccactcccagctaatttttgtatttttagtagagactgggtttcaccatgtttgccaggctggtcttgaactcctgacctcgggtgatccacctgtctcagcctcccaaagttctgggattacaggcgtgagccaccgtgcccagtcgatagctcatttctttttagtgctgaataatattttattgtatggatatatcacagtttgtttatgcatttacctgttgaaggacatctttgtttgggtagctgaagtttagacgattgtgaataaaggtactgtaaacattcgtgtggaagtttttatgtggtcatattttcagttcatttgagtaaataccaagtaatacaattgctgtggtaagagtaagtttagttttataaaaaactgctaagttgtcgtctaaattggctgtgtaaaataatttcatattcccaccagcaatgagtgagtgttcttgttgttccacatcatcaccgtcctttggtggtgtcagtgttttggattttagccattctaatacgtgtgtagtagtagtatgccattgtattaatttacaattccctgataatgtataatgttgaacatcttcttatatgcttatttcccatctgtttatctcttttggtgaggtagctgttcaggtcttgtcttaatccattgaggtatctaaaataccataaacatgggtgggttataaataacagaaacttatttctcatggctatggaggctagggaagtgcaagatcacctgcagattctgtgtctggtgagggcttgttttctggttcatagatagtgccttcttgctgtatcctcccatgggagaaggggcaaggcaggctctctggggcatcttttataagggtattaatctcagagccctcataacacgatcacctcccaacagccctacctcctcatactatcacattgatggttaggtttcagtgtatgagtttgataggcgagtctactaacattcagaacatagccttttgtccaattttaattgagttgttggtttttttattgttgagttttaagaattctttttatgttttgggtaacagtcatttatcagataagtattttgcaaacattttctcctggagtgtgtgacttttcattagtgtcttcctcagagcagacatttctaattttaacgaagttcaacttaccaaattttttcttcatggatgtgtttttgatgttgtatttaaaaagtcaccaccaaacccaaggacacctagatttttttcctgttatcttctaggaattttatagcttttcatttcacagtgaagtctatgatccatttcaagttaatatttgtgaaaggtgttaagatctatacttggattcatttctttaattgtgtctgtccagtttttccagcactacagttattttcccttatttttgagggtatgttccaagacccccagtggatgcctaaaaccatgaatagtgccgaaccctgtatgtaccattttttcgtatatatgtgttctgtgataaactttaatttacaaattaggcacagtaagtgattaaaacaacaataataaaatagagcaattatataattacaatatactgtaaaaaagttctatgaatgtggattatctccctctctctcaaaatatttattgtgctataaccacccttcttcttgtgatgatgtgagatgataaaatgcctacatgatgagatagtgaggtgagtgacataggccttgtgacatagccttaggctactactgaccttctaaccatatgccagaaggagaattatctgctttgaatgatcctagatcagtgagccatagtaatgtccatggttagatgttgagagcagacaatgccaatgactgatgggcaggtagtatatacagtgtggatgtgctggacaaatagaggatttatattcctagtgggatggagcaggacagcgtgagatttcatcacactactcagaacagtgtgcaatttaaaatttatgaatagtttattactggaatttttcatttaatattttggaatggtgattgactgcaggtaactgaaactgtggaaagcgaaagtgcagataaggggagactaatgtagtattagtagtagtagtagtagtcgtagtagtggtagtagtagtagtaataatgcttacttcttagggttaatgattaactgtggtaatgaatgtgaaatgcttaacccaatgactggcacaaagtaaggtctcacttagtggtagtttttacgattagcagtagttccccaatattggaaagtgtagaattctgaggagccagggatccactgatctttttctaaattataccacagacaagtatcagattagaagcctgagaaaactattatttagacaaataattgtaacaaacttggctctcttaacttctatagaactgtttttatttgttaaataacaaaagattatggtacaaaacaattgaagggttctagtttttcacaagtcctacaattgcaaaaaggtataattgcttaaaaaaatcaacatcagagaacagtaaaaagaaaaaaataggcgggcgcagtggctcatgcctgtaatcccagcactttgggaggccgaggtgggtggatcatgaggtcaggagatcgagaacatcctggctaattcggtgaaaccccgggggtctgtaccaaaaatacaaaagattagccgggcatgttggcaggcacctgtagtcactggtgcctgtagtcccagctactcgggaggctgaggcaggagaatggcgtgaacctgggaggcggagcttgcagtgagccaagatcgctcactgcaccctagcctgggctatagagcgagactctgtctcaaaacacaaacaaacaaaataaataaaaattatcttttttccccctccccttaattcttctgttcttcattgtagaattcgtaggtccttctaaatctttttctatggataggcatcataaaaaatgaagcccatcctgatttctcatgatgcctatcatataccttatttgaatctcatttcttgtgatgcctatcttataccttatttgaatctcattgtgttgtacctccaaatttcttacataaagtttcccttagaggtaaaattttaatagctcttagactactaagtgacttgatcataagccagaaggaggagggtcatctcctttatttctcacagttctggagactaggaagaaattaggcaacttagttaagaaaataagtttaattttttaagaaattagggaactttaattgccttataaaaattttattacaaatagtttaagtatcaatatgttttatatcaggcttttaaagaagagatgtatacccaaatatataagaccagttactaaaactatggaagctatagtgaaattctattagcaagctctggggcttttactaattctgccctaaaactcttccaatcaaaagcaatgatcaaattattaccagagcataagtaaatgtttatggtataaatgaaactgtacctgtaggagttttaatacatttaaaattttaaaattctacagaatggttggtttcttttaaaaattctagttttgtgatgttttaatccagaaattgaactcttgactaagttcaccttcccatacttgaaatttatgtttcaaaatttgaatggggtcggggagaaactgtaagtaaaacctacagcattctgaggtccaaaacttcctagattgcttcaactgcaatccatttggggaattgtgcagacatttctcatttatataagaaagttaatgatcaaactttgagaagtcagtatatcatggaaactttaccttaatgatgttattctgaaaagaatataatcatacagtagaatctatgcagttatttttaaaatatgcttcttaatttgggaaatattctaattgtttattaagaaaagtctacaaaacagtaaaatgatattttcatttaaacaaaaaaaagaatatagcctatcagaatatttacagaaatagttttcatgatgcgccagaacagtaagtgatgattgtttttgttttttatttttttagtttttggttttttttttgcaacagagtcttgcactgtcgcctggactggagtgcaatggtgcgatctcagttcactgcaacctccacctcccagattcaagcgattctcctgcctcaccctcccgagtaactgggattacaggcgcccgcgaccatgcccggctaattattttatttatttatttatttttttaattttggtagagacgggattttaccgtgttggccaggctggtctcaaacgcctgaccttgtgatccaccagctttggcctcaaagtgttgggattgcaggcgtgagccaccgtgcctggccgattgtttttgttttttattctcaccagtagtgtatcccaaggcttggtttagtcaggctttttaattttagctattctaataggtgtatagtggtatttcattgtagttttaatttgcattttaaaaatgactaatagtgttgaataacttttcacatttatttgccatccatgtgttgcctttggtgaagtttcccttcaaatcttttaaccatttttaaagattgaattgtttcccccacccctcatctgaggaggatacattccaagactcccagtgaattccagaaactgcagatggtactaaaacctgtatatactgcatttttgtatatatacatacatacgtacctctagtaaagtttataaatcaagcacagtaagagattaacagtaataatatgacagtgtcactactcttgtgcttttggcaccattatgataagtaacacaagggttgctgcaacccctgcagtcgatctgctaactgagagggctgctatgtgatgaatgggcaggtaacatattcagtatggacaagctagacaaagggatgattcatgacctggtaggaggaactgggatggcgtgagatttcatcacgctactcagaacgatggcaatttaaaattcgttcattatttctggaattttccatttattatttttggactgtggttgactgtcgttaactgaaattgtggaaaatgaaactgtggataaatgtttagactgctgtatttgttgaaaagactatcctttctccattaaaattcctttgttcctttgtgaaagttcagttgaccatatttgtgtgctagttctgggccatctgttctgttccagtaatctcttctttcaccagtaccatgctgtctttattcctgtagctttacagtaagccttgaagtcaggtagtgtcagctggctgactgttgttcaatgccgtggtggctattctgagtcttttgcttttccatataaactttagaatcagtttgttgatgtcttctatgtaacttcctgggattctgattgatattgcattgaatttgcagatcaagttgggaagaactggcatcttaatattgagtgttcttatccatgtacaccatgtaagcttccatttatttagaccttccttgatttctttcataacagttttatagttttcatcatatagatcttttttttttttgagacggagtcttgctctgtcacctaggctggagtacgttggcacaatctcagctcactgcaacctctgcctcctgggttcaagcaattctcctggctcagtctcccaagtagctgggattacaggtgggtgccaccacgcctggctaatttttgtatttttagtagagatggggtttcatggttttggccaggtttgtcttgaactcctgacctcaggtgatccacccacctcggcctccccaagtgctgggattacaggcatgagccatcaccccgggcctcatcatgtagatcttgtacatattttgttaggtttatacctaagcattttatttttgggggtgcttcttacgttttaattttaacgccaattattcctggtatatgagaatacagttgacttttgtacattaatttcgtatcctgcaaccttactataattgtttattagttctagctgtttatttgtggttgattccttgagattttcttcacaggcagtaatgttatcggtgagcaaagacagttttgttttttctgtaccagtctgtgtacgttttattcacattccccatttttttttttttttggcatattgcatcttataaattttgctttgtagcatctattttctcaccattaagtgtgatgttagctgtagagttttttattgtactttatcaagctgaagaaggtttcgtctattcctagtttgctaagagttattatgaatgagttttgaatcttaccaaatgctttttcagcatctctatatatgatcagattgtctttcttctttagcttgttgatgtgatggattacattaattgacaaatgttaaaccagccttgcatacctagaataaatgtcacttgctcatgatgtataagtatttttatacattgttggatcaatttgctaatgttttgttgcaaatttttgaatctgtgtttgtaagagattggtcagtagttttccttttttataatgtttttgtccagttttgggttaatttctttgtgtaatgtaaagaagtggtccaggctgggtttggtggctcaaacttgtaatcccagcactttggccaaggcaggtggatcacctgatgccagaagtttgagaccaccctggccaatatagggagcccctgtctttatgaaacattacaaaataaaaaatgggccgggggtggtggctcactcctgtaatcccagaactttgggagaccgaggcggtcggatcactgggtcaggagattgagaccaccctggctgacacggtgaaatgcagtccctattaaaaatacaaaaaactagccgagtgtggtggcacatgcctgtaatcccagctactcgggaggcagaggttccagtcagccgagattgtgccactgcactccagcctgggtgagagcaagactctgtctctaaataaataaataaataaataaataaataaataatgaaaaaaagatgtggtacagcttcagtcctttacagctgaatatccagttgtccaaagctccatttgttgaaaaatcttttgttatagaattgtcttgacaaccttgtcaaaatctgttggctataaacatttttggactctgaattccatttcattgattgatatgtgtgtccttatgccagtaccacactgtctcgattactttgtctttgaaaaaagatgtgaaatatgagtcctccaacttcttctttacaagattattttgactattctgagtgcatgcaaatttccatatgaattttaggattatcttgtcaatatcttttttttttaaaaaaagatagctggccaggcgcggtggctcacgccagtaatcccagcactttgggaagccgaggtgggcacatcaccaggtcaggagttcgagactagcctggccaacatagtgaaaccccatctttactaaaaatacaaaaattagccgggtatggtggcacacgcctgtagtcccagctactcagaggctgaggcaggagaattgcttgaacccaggtggtggaagttgcggtgagctgagatcaggccattgcactcagcctgggcagcagagcaagactccgtcttaaaaaaaaaaaaaaaaaaaaaggtggctgtaatttcaacaggattgtagtggatctgtaaatcaattctgggaatattgccatcttaacatcatgaagtcttccaatccatgattatggattgtctttctttatatctttctatgagattttagagttttcagtgtataagtcttacattcatttgttaaagttattcctgagtattcttttttatgctattatatttggattttttttcctcttaagttcttttgcagtgtgttctttgctagtacttcattattttgacatcttttcagtatgtaatgttaaactctgtcctgaatttattttaatattaagatagattacattttataagcatcaccctaaggattaaaaaaatctatctagatagggaatgatggtgaaataatagctattcctgaactctagggtttaatttctggttttctgtaaagtattggaaaaggactttgctgttaacccccagccagtctctctggttccttaatgtgcttggcggttataatacctggaagtacttgcctgtgcctcttttctaccagtactagggtttcttattttcctaatccttccaagttactgaatagagagccctttatgaaattggagaagtcattttacctctctaaatttgtttcttcttggtaagatgtaggatgaaatatttaataatcattttaagtttttttcagacttaagtgagagtactcacataaatagcttccttaatctgtaaagaaatattcaaatatcagggttcctttctcttcaaattagactttacctttcttagcttgggtaatccatcaagatttatctgaataagctacttcacctcacctttctgttaaaaaacctccactgagtttttgcattacaagatcaagtgtgaactaaggctagccaactcagtttgtatatactatgtgcaaaggactacattagattttgtgtaggtgacaagcaggcatatgacagggtctctgcaatcagggagtttatagtccatgtgaagtattaaacgaattatctagtttggtgccagctgtgggagttcatggtttgtatgatgaactatcttcctgtagattgccctgaaaattgtgctcacatgatatcttagagaacctgcaagatttataaacacagtaactgtttatgatagataacaatcaaactcaatttctagggctttattgaggagagtgtttatctaggcactgaccatgtactacccaactcttggtaatgcctttaaatttttttttttttttttttttggcagacactctgtgagaggcacagattttcagtcctttgaacacttaataaatgaaaattgatctgaagagaatattaaaacattttcacttgaatcttcacagtctaccagtactagggtttcttacttcctaggtggatggaaagtgttttcaatgaatttggaccagaattggtacaaaaatcaaagaattcaaaatgttaaattattttgtttttctttaagattgttacagtttgataagtatttttttttaaatgtcatcagaaaaataaagcataggctgggcatggtggctgatgcctgtaataccagcactttgggaggccaaggcaggaggattgcttgagcccaggagttcaagactagcctgggcaacatagtctgttttatagagaccctgtctctataaaaataaaaaaaaaaaaatggctgggcccggtggctcacacctgtagtctcagcacttcgggaggctgaggcaggtggatcttttgaggtcaggagttcaagaccagcctgtccaacatgtgaaaccccatctctacttacaaaaaacaaacaaacaaaaaaccacaaaaattagttgaacttggtggctggtgcctgttagcccagctacttgggaggctgaggcgggagaatcacttgaacctgggaagtggaggttgcagtgagctgagatcacaccactgcactccagcctgggaaacagagcaagactctgtctcaaaaaaaaaaaaatggaagtataatattataaaaacctataatttaattattttgcttttgatttgtttgctgtgtttaaaatgagctcttagatctgccttccctagctttattgagatataattggtatatttaaaaactgcatataattaatgtgtacaatttaatgcatttggacatatatgtgtactcatcttaccatcactacagccaagataattaacatatatctgttgcctccaaaagtttcattatgccccttatgcaggtaagaacatttgacatgacatctaccctcttagtaaattttcagaagttcaccttgttaattataggcactgtgttggaaaacatatctctgtaacttacttatcttgtataactgtaactttataccattgaacaacaactattcatatcttcctcccctgtctcctagtaaccaccattctgttgtctacttatataggtttgattccttgttacaaaaaataatgcagtatttctccttctgtgactaacttattttgcttagcataatattttccaagttcatctgtgttgtcacaagtggtaagatttccttccttttaaaaaacttgtaatgtttattctattgtatgtatataccacatttttcttaccaattcatctgggttttcacatctttgctattgttcataatcttagaggaaaagttttctgtttttcaccattgtgtgtgatgttagttataggctttttttgttcttttttgagacagagtttcactcttgttgcccaggctggagtgcaatggcacgatcttggctcattgcaatctctgcctcccaggttcaagtgattctcctgcctcagcctcctgagtagctgggattacaggcatgcaccaccacacccgactaattttgtatttttactagagatggggtttctccatgttggtcaggctggtcttgaacttccgacctcaggtgatccacctgcctcggcctcccaaagtgctgggattataggcatgagccaccacgcccaacagtgatgggcttttcatatgcagatgctccatgacctaaaatgaagttatgtccagataaactcattgtaagtttaaaatgtcattaagtcaaaaatacatttaatgcacctcatctgtagtacattatagcttagcctagcttaccttaaacgtgctcagaacactttatgttggcctgcaggtggacaaaatcatataacaaatagcctattctataattaagtgttgaatatctcatgtaattttattgaatactatatgggtactcatcattaatgtacacagctgaaaacaccattgtaaagttgaaaatttttaagttgaaccatcaagtcagtgactgattgtataacttttattttgttgagataagttccttctatatctgattcgttgatggtttttgtaatgaaagggtggtaaattttgtcaagtgctttttccttttttttttttgtttgtgagacagagtcttgttctgtcacccaggctgagtgtagtggcccaatctcggctcactgcaacttccgctttctgggttcaagcgattcttgtgcctcagcctcccaagtaactaggactataggtgtgtgccaccacctccggctaatttttgtgtttttagtagagatggggtttcaccatgttggccaggctggtcttgaattcctgtcctcaagtgatctgcctgccttggcctcccaaagtgctaagattacaggtgtgagccactgtgcccagcctgtttttttcatcacttttaatgcaccaacaatgaggaagagattagtgctgttgtatatatacgcaatctttggtgagccagagcttggctgaagaatggtattttcaagcctggccctgtgaggatagggctcttgatcagtttttaatctttggagagattagctggagaggggttagagagagtggtatatcacagctctattctcaggaatgggaagtagtcctttacatgtgttttgaggggtgggggttcatgacttgggaactaatttgtttctctaactcctcctttatttttctggctagtagtgacacttcttacaataaaatgtactgatatgtattgacgtatctctttttgtattctagatgtgtataacaataaacaaaacagacaacaaaactatgtcattttaaagcttatattgtagtggagagagatggacaataatgaataaatatgcaacatagatataatatattagatgattgttactctggagaagattgaggtaaaagaaggggtttaaggaatcctgagagtaaatgttgacgttgcaattttaaatagtgtgagaaagtatgtagcatttgaggaaatacctgaagtatgtgaggggggctgatagtcagatatttatgcaattgtaaagcaaagtagagaaatcccacatgggtaaaactttttcccactttccctcagtgatcacatcttgcaaaattatagtacattatcacaattaggatattggcattgatagaatccatcgattttattcaaatttcctcagattctcttttactactttggagagctgtatgtgtatatatttctttcttatgtttttaaaattacatgtataggtttgtgtatagaccatgatagtcaagatatagaacatcacaagtatcctcttactgcccttttataaccacattgacttctctccctgccattcctccacccctaacaaccagtataacccctggcagtaaccactaatctgtaccatttccaaatgttttttctttcaagaaggttataaaaatggaatcatatccagtatgtaaccttttgtgttggctttttttgtttcagcataggtttctggggatgcaaccatgttgttgcatggatcaataattgtttcttttttattgctgagtagtattccatggtatggatatactacagtttgtttattcacccaatgagggacatctgggggctattgtaaataaagctgcttctaacattcatgtgccagttttaatgtgaacataaatttctatttctataagacatatgtccaagagtgcaattgctgggatcctgggtaaattttgaaagttgggccaacaagatttcttgatagattaatgtgaggtcaagccgggcgcagtgtctcatgcctgtaatcctagcactttaggagcaataattattattgctaataatagcactttgggaggccgaggttggaggatcatttgaggtcagaagttccagaccagcctggccaacatagtgaaaccccatctctactaaaaatacaaaacgattagctggcatggtggtacccgcctgtaatcccagctactcaggaggctgaggcaggagaatcacttgaacctgggagacagaggttgcaggcagtgagccgagatcatgccactgcactccagccggggtgacagagtgagactccgtctttttattttttatttttttaaaagaggtcagagagaaagaggaatcaagacttcatggtttttgacctgggcaactagaggagtgaaattgccaacagctgacatggggaaagctatgggaagagcatgtttaagggagatgaagaattttacttatgacatgtcaagttgatgtatattagacacagaagaattgtcacataagcagttgcttaaaagattttggaattcacagaggtggtctggtctagagatacacaattgggagtctgttcagcctttaaagccctgagactggaagaggtgatagaagcagctgaaagaggtgagagattaagttctggctacttcagtgtttnnnnnnnnnnnnnnnnnnnnnnnnnnnnnnnnnnnnnnnnnnnnnnnnnnnnnnnnnnnnnnnnnnnnnnnnnnnnnnnnnnnnnnnnnnnnnnnnnnnnnnnnnnnnnnnnnnnnnnnnnnnnnnnnnnnnnnnnnnnnnnnnnnnnnnnnnnnnnnnnnnnnnnnnnnnnnnnnnnnnnnnnnnnnnnnnnnnnnnnnnnnnnnnnnnnnnnnnnnnnnnnnnnnnnnnnnnnnnnnnnnnnnnnnnnnnnnnnnnnnnnnnnnnnnnnnnnnnnnnnnnnnnnnnnnnnnnnnnnnnnnnnnnnnnnnnnnnnnnnnnnnnnnnnnnnnnnnnnnnnnnnnnnnnnnnnnnnnnnnnnnnnnnnnnnnnnnnnnnnnnnnnnnnnnnnnnnnnnnnnnnnnnnnnnnnnnnnnnnnnnnnnnnnnnnnnnnnnnnnnnnnnnnnnnnnnnnnnnnnnnnnnnnnnnnnnnnnnnnnnnnnnnnnnnnnnnnnnnnnnnnnnnnnnnnnnnnnnnnnnnnnnnnnnnnnnnnnnnnnnnnnnnnnnnnnnnnnnnnnnnnnnnnnnnnnnnnnnnnnnnnnnnnnnnnnnnnnnnnnnnnnnnnnnnnnnnnnnnnnnnnnnnnnnnnnnnnnnnnnnnnnnnnnnnnttttttttttgagacggagtctcgctctgtcgcccaggctggagtgcagtggccagatctcagctcactgcaagctccgcctcccgggtttacgccattctcctgtctcagcctcctgagtagctgggactacaggcgcccgccacctcgcccggctagtttttttttgtattttttagtagagacggggtttcaccgtgttagccaggatggtctcgatctcctgacctagtgatccgcccgtctcggcctcccaaagtgctgggattacaggcttgagccaccgcgcccggccccctattttaaaaatagggagattatgaagaactagcaaagaaaaccacaaatttggccaatgagaaaggagaaaaaacaagataatttagtgtcctggaaggtgattggagaaagcgtttcaaggggagagggagtcaaccaatcatttttgtgtaaactttagttgtagcacaaaggcatattctccacagtaaccagaggctttagttgtgttgtattccagggggtgtgttggatgatgctcccttttctcgtttcttttgggtaaggagagttttcgagttttagtttgtatattcaaaaagcaaatggtctaagagaggaattgaattctacctgttaagctccaacttaattgtttactcttttcatgaaaaatctttttaatttcctagttggaagtattgtttctgtttttagaattctccatcctttttttttcttcagggttgggggagagacagggtctcaccacattacccaggctgaagtgcaatgtcacagtcatagcttactatagccttgacctccctggttaaagtgatcctcccacctcagcctcccgagtagctaggaacacaggtgtgcatcgccatgcctagttaatttatttttattttttgtagagatgcaatctccctgtgttgtcaggctggtcttgaactcctgggcccaagtgatcctccttcctcagactcccaaagtgctgggattacaggcatgaactgccgcacccacccacccgtttttcgataactctaatggcacttaacgttttctgttgtatggcatctgtattagtccattctcacattgctgtaaggatactacctgagactgggtaatttataaaggaaagatgtttaattggctcacagttccgcatggctgggaaggccttaggaaatttacagtcatggcaaaagggaaagaaagcaggcaccttcttcgcaagatggtgggagacagagtaatcgtgcaggagaaactaccatttataaaaccatcacatcttgtgagaattcactcactattaggagagcagcatgtgggaaaccatccccataatccagtcacttccctctcttgacagttcgggggtagaggtcctcgcctcaacacttggggattacaatttgagatgagatttgggtggggacgtggagccaaactatatcagtatctttatttgcatacttgtatacttgtcttattttgaattataagctctttcagtactgaggtcctcctttattgtcatattttcaagcatatagtaataaatggaattgagttacattttattgtgatagagcatggaatctgacacacctggtttaaatcttgcctgtgctgcttgctaccaaatttcttaacctttctatgcctacacaccctcttaagtggggatcatagtgttgcgtacttgataggtttgtggagaggattgaagttatgaagatacagctcttaacagagtggtcagctcatagtaaattctttgtgttctatagttgttggtgccatcattgttattgttaataataatatgctgttatgttattgactctcaaagatacagggttaaaggaatacacacttaagcgggcattgacttacatgctagggcttctgaaaactaagtattcatatctgctttagtagtccatattacctgtcaggatataaaagtctgttattcccttagtccctgcaggcatcctttgtgttgtttctcttccatttccctttctgtgctgggtaagtcgtctgtgtaactgattgggaaaagtagcatacatgagtcctttttattgtttctataaaattggggttttgttacagaatatgttaagcctacctaggcagtatgttattttataactgtaatttgaaattttaacttatacactaattatagttatataaaaggaaaatatcataaatttccagaacgttagtccctaaattaatatagaaagtccactatgtatgtgtactaagtacaaaattgagattgaaatgtaaggaactttctttttttgccttctggggcagggattggcaaacagtgaaccagccacctgtgtttgtaaataaaatttaccacaaacagccacattaattcttatacatattgttgtaaacagacagccacattcattcttataaatattgtcagtgactgcttttcccctacaactacagagttgaatagtttatagcagcctatatggcctgcaaacctgaagaatttagtgtctggtcctttacagaaaatgtttattcactcctgttcaaggctattatttttgtggctcatctcttacagcttttctcactctgtctcttgtattgattcctgttcttctgtctgcttaaacgattttctccaggatcttttcttgaatagctcacctttcttagggcttatgtcactccactgtctaggttctactttctgactaatttctttttagtgtcctttatagactttctgctgctggggagtttgatcactgtttttctttttttataggtttagcatcttgaatccaaaaatccaaaatttgaaatgctctgaaatttaaaactttttgagcaccaacacagtgtttaaagggagtgctcattggagtattttgaattttggattttcagattaggaatgcttaatgggtaaagatgatactaaatccaaaaaagtctgaaatctgaaacacttttggtcccaagaattttggttaatgtgtattcaacctgtataggcaataatatatactctcctatggcttctgaagcacccacacctcctagaggataagaggaacatattgtattgctttctgcaccttttttatctgcttcggtgtccctgagtcatttcaaaatgaatgtgtcccaaattgaactcatttccttctgcttccaaaacagcttccccggccactgaactctaccatgttagtcatgtgagcgaaaagcctgatagctgtcacctccctcctcctatttaccaatccagtagcagtgggtgatcactactgttgtagacccattttcttccttccatttttctctgtttttactagtgtagatcctagttttatctgctgctacctttgtaacatttttttcacagcaatcttcctaaaacaaatctcttgtgtaaaacacattagtgggctgggtgaggtggctcacacctgtaatcccagcactttgggaggccaaggcaggcggatcacctgaggtgaggagttcgagaccatcctggccaacatggtgaaaacccctgtctctactaaaaatacaaaattaaccaggcgtggtggcaggcgcctgtaatcccagctactcaggaggctgaggcaggagaatctcttgaacccaggaggtggaggttgcagtgagttgagatcatgccactgcactccagcctgggtgatagagtgagactctgtctcaacaacaacaacaaaagcaaaaaaaacacatcagtggttctttatgccctgtaatatttagcgctctctttaagaccttccacctgactgcatttcagaattttacaaattaataagcaaatttttcttagctcctgtccccaagtatctattagcactttttaaatgagctcgacttaatcacattgtgttatagttgttgttttgctcatccattagactgtaaaacatttaaagattgtaaatttttgtattcttagggcccccagttctgacacatagttggcttcaaaatgtgatcattacacattctgtgcatggaacaaaatatccacatacctcataaataggtaaaatatcatgtatcaattaaaaatatacttgtgcacatggggttattttaagggttttttttcggggggggggctgtcggttcttttagggcaactgaatttactgtaaaatcaaagatttagagatgaattaaatgctttttcagtcttattatgatgactaaggatggataatgcaactttggataaccttcatttttttttgcagaagatgtactttgggaaaatattctttaagcaaagcattggaagtgaatcctattttactagattttgtgaaagtggaactttctgtggtgggggaagatctcccaacagaacaaactttgatgaagaaaaaaagatgatagccatatgctgcccaccatacacccacaatattaagcttgctggttgtttcttcacctaaaagtttacttttcctttattaaactttatgtaatagtacaaaaatatacccttctggaactttttcactctgtgctttagcttccaaaagtttttctttctcttgtctttttttttaaagcatgagatgtcagatattgtaaaaatgagtaaaagcctctgtgtctaatctagaggtggatatatgttaatgagtattggttaaaacaaaaggataagttttcctttagatgtgccatttaggctttttaaatactgatattatgcttactctatcttgggtagtcattttgttttatgagtaagttgggaatgattagtaagaatcttgtttacatgttttcttttgtcttttctatttgaaaaaagatgcctttacaggcaggtcagttaccacaatttaaaatttctaactatgaccttaaagtaagacatgcattttaacattgcagccggtgcacagaaaaatagttacaagtttcatggaaaaaaaaaaccttactatatgtaaagtgatattctgttccattctattctattcttattcctctattctattctattctattctattctattctattctattctattctattctattctattctattctattctattctccttccacacttccttctcaatgctgattggctggtgcccatagtttggaaaataataccaagttggaaagtagaagaaattacagaaggtgggaatttactttgttaaagacaaagtaacctgctctgagaactctgtgagtaatgcagaaagatgtcttaaaacacttacagtatgttggttgggcaaggtttgtgagtgtgtctctgtgtctgtatagtgactgtaatgtaatatctgatttctataagctacttttgaaaagtatccttttatgtaacatcagtgaactgtagtaaaaatgaaaccaagagaatatatagtaaataacaaaatatttgtaagtgctgcagggaaagattagtgatggcctcattaaaaaggtaaaagttaaataggttcttaaaggatgggcttagaatgtgtgtaggttggagaaagagtcaacgcattccactgatggtaatgtgatggtaaatgtaatagaattgggagtacaactggtccagagttgggaatgaaacaatgtattcaggaagagtgagaagtaaagatctagctataatatagagttcacattggtcatgaatggaagactaaactgaaaaggagaggccagattataaagtgatttagactttatcttgtaggcaatgcgtgtctctctgtctctctgtctctctgtctctgtctctgtctctctctctttgctaacatttgccactccatctgtcttggttactatttgtatcatatatcatttttcatacttttacttttaagttgtttgtgtctttgaatctaaagtattaattcctaaggatagattatagatgcacctttctttttatccagacttttgattgtatgcttagctcattcacattttatgtagtatgtaatgtagttggaattatatgtgccattttactctttgttttctatatctttcatattatatttgttctccgttcttcgttactgtcttcttttgtgttgaacaaatattttttagtgtatcgtcttaggtatgctgttgatttttaacattaaaaaagttattttcttagcggttgctctaagaattacaatttgcattccaatttatcatcaccaactttaggttaatactgatctaatttctgtaaaatatagcacttttgctccattataactttgttttctccccctcctttttgctgttattgccttatgtattacatttatttacattataaacccaactgttattatattctgtcttttaatgaaattaagaggaaataatgtcttttatattttctcatttatatttaatacatctggtggtcctcacttgttgtgaatttcagttaacatatggtgtcatttccttttggctcaaggtacttgttcaactatttcaactttaagatattctccatctttttaagtttgaggatgtctttattcttcctttcttgtttgaagaatacttttgcagtaaatagaattcttagttgacagtttttaaaaattttttgttactgccttctggcttccgtttttttcctgatgtttagtcagctattaattgtattgtttttcccatgtatgtgatgagtaatttctctgttgttcttctcatggttttttttttttttttttttttttggcggcttcaaactgttcaaatgtgatatgcttagatgttgatccctgtgtttatcgtatttggggttcattgatcttcatggcttgatagattagtgattttcatcaaatttgggaaattttcagccattatttcttctaacatttttttctcctttctctttttccatttctgcctttacacatatgttgatatgtgtgatgttatcccagaggtctctgaggctctgtttatttttctgcagtattttttccctctttgttctttcttttggacaatttctgtttctttatttttaagttcactgatttttttttaatgccatctcaaatgttctcttgaggacatagtgaatctcatttttgttataatgtgtttcaactctagttaactctcgtgttttaaaagttaacgtttctttattgagattatttgttgtgcaattgtcatattttttctttaatttttgaaatatggtttcctttaattttttaaacttaattataaattataatagctgctttgtattctttatctgctaaatccaacagctgtgcccaccaggagttaatttctggtgactattttaacctgattatagggcaacttcttctgtagtttgcatatctcacaattttttttcaattgggcatattatataatatattatagcaacactaggttctgaattatttttttgagacagggtctggcctgtttcccaggctggagtgcagtggcatgatctcagcttaactataagctccacctctcggactaaaaccatcctctcacttggcttcctgagtagctgggactggtggtacacgtcaccacgcccagctaatttttgtattttttatagagatgaggtttccgtgttgcccaggctagtcttgaactcctaggctcaagcgaccagcctgcctcagcctcccaaagtgctaggattagagacgtgagccactgcgcctggcctgattttttttttttaaaaacctcctgacaaatgattgttttgtgtttttgttttgtttttaaataactaacctgtacataatctgtagaactgttctccccaacagatagaagccctagaattctgtgttaaaaatttaattctaatttccatttttaaacctgattttctaggatcaactctttgtatagcttcatggtcagccagttattgcttagagattgtgcttaaacaacttgaatttttttaaaactttcagcttttttttttgagatggaatttctctcttgttgcccaggctggaaggcaatggtgcaatctcggctcactgaaacctccacctcccaggttcaagcagttctcctgcctcagcctcccgagtatctgggattacaggcatgtgccaccaagcccggctgattttgtatctttagtagagactgggtttcaccatgttggtcaggctggtctgccacctcagcctcccaaagtgctgggattgcaggtgtgagccaccgcacccagccactttcagcattttttgatgatcctgtgtgtgagttgggaagtgtattcaaagttctgacagttttcacatcagccttggcttttactttctctggagctctcttgagcctccccctcatatgtgcactgactgtcagacaggtgtgtgtggggagcttatttaggctctctgtgcctctctcatttccagtatccccttattaaatttctgggtatccttctagtctgtcattttctccagctgggactacattctcattttagcagagctgtgggcctttcccctttatatccttccaaatttgctatttttattgccagtaccactaggcatgggtttttgctctctatcctaaatgaccatagccctctggttttcactggcaacactgccctgggaaaactgcctcactgattgagttgggtggttgtagggggacagtagcatcccttggcaaagaaggccactttcctctactgtattgtcatatctagcagctttttaagaaaaaattcttctcaatttgttgttgcctttgcttagtttccagagccctgaagtgattgttttcttcagtgtacttcagttttataagtattgtgggggagtggatttgctaccctcgtcattctgctgtacctggacatctctcttcaaacttcctaaccccttcggaccctgtgtcccctacacccactttaattcaatctagtcagtttttttcaccattgttctactgaaaccattcttgtaagagtccccaacatcttgcatttgtcatagcaattgtcattttcctgtttttatctagccattatccttctggctatttcttgaatatgccaagcgcaccactgagtttttacatttgcagttccctgtaaccatcttccctagatcttcacatggttcttaactttatatctttcaggttgatgttcatatcttaaactgcttcgtaaggttttctctggcttccttatgtaaaatagagacatttctaaagtaacacaataggaacagaagagtaaacatagatgaatatttaggtccttatacttgcttcacttaatgcatctttcagtagcttttgatataaatggccactcagtttttctaaaaaatttttaacatggcttctaaggtaagattctttcttatttttcttcctgctttattaactactctactctgtcctctatttttcatttcatgaattttttttccgtatgaacttcttccttaggtgatattgttaggtacccttgctttaaatctcctttatctagatgactcccaaatgcatttttccagccttagcttctaccctgacctcacgtgaacatctaataaggatttcaaacttaatagataaaaaacagaactcttgatctactttttccttcaaacttactgtcttaaatttttagaatgcttttttttttttttttgaaacggagtcttgctctgtcgcccagtgctgtggcgcgatctcagctcaccgcaacctctacctcctggattcaaatgatagaatgctattctacaaggtaaatcggattgtatcactttcctggtcaaaatctccattagcttccctttacatttagagtgaaattcagtttcttaccgtgtttgatgaaggtttatatgatcttgtgtctgcttacctctctgaacataactcctacctctctgaacttaactcccacctttctctctccttactcagaatgctgcagccacattatctttctggctatttcttgaatatgccaagcccaccactaggtttttacatttgccgttccctataaccacagtgctctctcctcagatcttcacatggttcttaccttcatatcatttggccttgtgttcatatcttaactgcttcatgagattttctctaacttccttatctaaaacaagacatttttaaagcaccacaataggaagagtaaatgtagatgaatacttaggtccttgttcttgctttacttatgcattctttttgatcaaaaatattgtgcacaatcttatacaacttctgttatctgggaatttaatactctgttaccttggttaatgagtctggaaaagtaaataacttattttaacatagttggctatgttaaaaaatcaatcttaatagctgtatgttatgagaggaatgagtattgatttacaacagttctccctcaaacccagctacctaaatgtgaattcacaaagtatagaggctgggtgctgtggctcacgcctgtaatcccagcactttgggaggctgaggcaggtggattgcctgaggtcaggagttcgagaccagctggccaacatggtgaaaccccgtctctactaaaaatattaaaataattagctgggtgtggtggcaggcctctgtgatgccagctactcaggaggctgaggcaggagaaaacccaggaggcaaaggttgcagtgagccgaggtcatgccattgtactccagcctgggcaacaagagtgaaacactgtctcagacaaacaaacaaagtatagaaatacttccagaaatagcttcaatttggaatggaaatggacacaattttgaagtctgtagttttctgtgttcctctctctgaaccagttaacacttaagagcctgttgtcagttatttgttaaagtaattgtactatactttctgactcactttctgtttgctttctgactttgtttccataattttactaacaagtaatggaatgaaagattgataccttataaaagcattttaaataccattgtacacataagcccaactttgaaaggtcggtttaaaggaacattcacttctgctgtcatcttctaagaactagaagccatcctactcttcctattctaggatagctgtctttacctgcttctttggtcccaacgcatcctcatccgcatccttcttggcctcttttctaaccgtaacaccatttcctttccagattcttaggtatatactttatattttctagctcttctaaatcattactttaaagctttatttttttggctagaaagctggcattttggtattgtttctgtgtgttatgtaatttgtccttcattaactggatttctgacagtcaagtatattgttggactataataacctctttgttaatgtacagtctagtcagatttactgctgcaaagtctgtggtatgaagaaatcatattatttagtgatttctttttttgaagaacgaacataattttgaaacttcccaaagggaaaatagttttgtgtggtcacaaatctatcaggactgtatgatttcttttcttttcttttcttttcttttcttttcttttctttttgagatggagtttcgctctacattcactttttctaaaacttagcaactgagctcttttcatggagttgatgctcggtttttttgttgttttcttttttctcactgcatcttagaaaacaagatcaaactatttgtggtaaagtaacagtttttacaattttgaattcatcgaagactgttatttttgtgaaatatacaaatgcattgctagaaagatgaaatttaaaaaaaataaaatatgggtcctaattcttattatcatattcatagatatcaatttattctctcattgttataaaaactctaaacactctcaatttctgtatttgtcttattggagagcagtaacagatatttcatggactagtaacaaatattttgcagatcagtaccaccacagatcacacttttagtagcgtatctaattttattgcttaatgttatttcagaagcatcttattcactatgatgaatagctgttatcttttaaaaatatttttttatgtgtttccttttcagaaccgagagctccagatcatgagaaagctagatcactgtaacatagtccgattgcgttatttcttctactccagtggtgagaaggtaggtttgacacaaagtgtgtactgaacattgtgataaatttgttatttttctagaaattaatctcccttccccccataagacagttttgctaatggaatggaaaaattccaaaacactagccccagcaatactcagtccaagacatggtcattgaatatcattagttatatcaggaaagcattagtgagataaagggaatgcacttgtaagaattttcttcttcatgaaagcatctatcttcacttctcaagaaaatctatatactttttaaatttttttaaagacatctatgttccttatgtgcttacgcagccctctgatagtttacctatttattgcagggaggaaaattaagttattttgttaagtgaagttgataagaggtgaaaaggtagcaagaggactttggtaggaacagaatgagggttaaacatttggaagcaagttgagccatccttgcttggccagtgaaaaacttggaaaagatatattgcagagcttactttaagtgatccctatgtctgatcacaatgaattctgtgaaagcaaagggtaaggaagactttgtgctgctaataactccccaacccgtctttctcttcagaagatgcaataatcaatgaagttggagcaaagaaaataaatttctgcttttccttggtgtctttatttttctgcccgctgctatcctttctttcttttcactggtttggagtgcataggcagggcaggtaacaaatcacttgattcttttggctaaataaatatgactttggataacttcacttggtattttggacttcagatttcatgcatataatatctaatgttcttagatccataatacttgatttctagctcagtgttcttgttactttacgtaactgttttctagtataacagtttttagccattttctattaagctttttttttttttttttacagcaaatattgcctgacaacattttctattaaagtttatttagattatttccttagaaaatctttttttttaattccagtgcctattatataggaagatgtcaatgtattaagcccgaattttgatataaatgtctacagatgtataattgttgcgtatatacacatgtattgtaactaatacgttttaacaactatagttagcaaattggccctttattgacccttgcttttcagttgctcttttttttagtttaaatgatacctctggtttactaaggattgtaaatcctcataagtattagagcttttttatttctaaaccccgttacttggttcatactactttttttttttttttaacctaccaaatgacctatttttatctttattctgatctgtttgggcatgtgtttgcatttttctgtctcttcctaagtaaaattatagagcctctgttatgttcacaagtatgttctttataatggaattttgcatattcattttgttgttgttgttactagatgaatcatgatactcctgggtaagaattatgtgttccatgaactgctggattacaatagattcatttgaaaaaaggcctcctcccagagttcttaaacattttctctttgattacttacttcaatgtatatagcattccttatatgctaggcactgttttaatgctttacaaatattaactcctttaactcttaagaagttgaagagcagaaaagaaagactatcaaagcatttgaatgcaaggcacctgatggcttacttgtctggttttggtttgatggaaaactcctgtcatagtcagctcttaccctgactcagtccttcactgggggtgacaactgactgtctcttatctgtatgccccagaggataatttcctctttgctgctgttctcagtttcttacttatcttaaaggttcttacagataaagagcaattagaagtcattaacagagattaacctctattattaaaaaaaaatagaccttctaatattttctttatgtcagaactttctcttgagctttgtaaatttcccaaagttaaaaaaaaaaaaagacacctcctaattttgggatagcttcattaaaaacaaaaaggaagaaaaaaagaaaagttgtggtatattgctgaaaataatggtccttctttgtcaaaaaaagaggaaatttttctaagatgtacagaaatacataggttcaagacttcccatagtctctcagccaccaaaaagataatttctttttgccccactcataatctccacttctgaattattctggcaggactaagatatccttcaggagaccaagcagtaaactatttcttcccataggagaagatggattcttttctagggttgagtgctcaggttagttattttcagttcagttctaactttcttggaataggttgctgagagtattcactgctgtttagaaagtaacctaaatgtctgtgaaattcttgcaaatccttgaagatgatttatcttggaatatggcagtcctatatttggtaggcatttttctagcagaagcatcatgtattgcttatgtgtattatgtatgagaagagttttggaggaagaaataataaattaatcatttgagatgtttatgacacatgcaagtagagatgcccagtagacagatacatgtgtgacttcatagatggtggtggtggctctaggtggagaggtgacattgacaaagcaggatagagagggtgtgtagccatgtggagcttggggagggaggagatacggagtgctgtttgaggccaggacagtgaaaagccagcatgtgcatatggaaaaagatacacagaattgaagtcaaaggtcaggatagtggtagtgaataatttagtcgttttcctcaacattttccaaaaagggagtaatagcggcccagagagaagagacactaagagagacaacgaaggaaatttaagacagatgagaacccatataaagatttagaaacaatcagataggtgtatgcataataatttatgatctcatacagatttttttttcttgcctcataatatgtataggtattttggttatctaatatttcattgttgtgctatatgatattttatctattcccacgttgttattttcaattttagaattgtagctaagctaccctgtggccttttaataatttttgtctgtaagtacttttgcagctctgggagaattaaagtaggatttctgtaataacaggcatgttttacatttcactgaccacagtttgacttgaatgtacgtctattttgataaccttctttttattgtattctgccttttgcattttaaagactttctttaggaattgtggataatcagcttttagcctgtaacaggggataggggtagccaatgtaactagaagaaagaggaattaagtcaggacagagattagagatgtgaactaattagccttagttttctggttggaattattaatgtttgctgtagtaactagagcatcatgtagtcaattcatatactctatgttacccagtagtaactaactctgatttagtttagagtaagtagtacctcctctctttaccttcccattagagaaaaatgggatatttgagtgttttgaaactctgggcttataattttgtgaatttcaagtatcttatagaatagtctttctctttttttgatatttggcagtagaaactttctacatccccaatgaaatcttatgaagacctctgatagaacatataaaaagcagagttgccctagttgaagctaaggtgtggaatcagctgattttgccttttctgagttatagcttaccccatagaactctaggactctgaaggtcatatgataaaagccatgttataagctgggtctgatggctcatgccattaatcccagcattttgggaggccatggtgggtgaatcgcctgcggtcgggagtttgagaccagcttggccaacagtgaaaccccatctctactaaaaatacaaaaaattagctgggtgtggtggcgggtgcctgtaatcccagctccccgagaggctgaggcaggagaatcgcttgaacccgggaggcggaggttgcagtgagccgagattgccccattgtacacaggagtgaaactccgtctcaaaaaataaaaaataaaaataaaaactgtattatgtctatacaagatccttaagttttatttcagtcaattactagttttctgtaagaaaaacttctctaagtaacttttcatgtaaaagtttttttccttgtgattcatagattaccaataaagagaaaaacctctgccttctactttgtgagagactgttcaaataacaaagatgacagttgattttatttctcatgccacctttgttctattgatagtaatggggacctgtgccagaaggggaggattgtaccactgcatctggtatcagagagcagaatgctgtgcttaattttgcccgtctaccactagctctggagaggaaaggataggggtgacatatatgccaaggattcattctgaaaagtaaagaggactggctttgtagctagaaatatttgggtttgcattccatttttgccacttgatagtagtatgactctgggcaagatacttacttttataagcctcctccccgtcatctgcacagtaggggttttgtaaggaacaaatgtaataatgttatcaagtgcttattatagtacctggcatataattaacacttaataaacattaatttactattttacctattattgtgtttattaatagcaaatatatattgcactttctatatgtcagacattgtcccgagccgtttacatattttataactcacttaaacctcatagcaacccattaaagaatgggtttacagaacaactatttttatagaagcactattttatagaagaaactgacacaacagcagttaagaaagttaccatacaactactaaatggcagtgttgggagtcagctccaagtagtctgactccagagtctgtatagtatgctgtagtgtttagcacagaacgtacattcctccagaagcagtgtgctagaaatagaacatttaaaaatatcttagtaaattatcaaacaaggggagattataatattaatagtagtaataggccgggcgcggtggctcatgcctgtaatcccagcacttttgggaggccaacacgggtgaatcacctggggtcgggaatttgagaccagcctggctaacatggtgaaaacccatttctactaaaaataataaaaaaatttttaaaaagtagccaggcgtggtggcaagcgcctgtaatcccagctactcgggaggctgacgcaggagaatcgcttgaacctgggaggcggaggttgcagtgagccgagattgcgccattgtagtccagcttgggcaacaagagcaaaactccatctcaaaaaaataaataataataataatgatagttgcagtactagtaataatggtaattataataatagcttaaaagtatgtgatgctatatgccgggcattaatctgaacactttacttatatttactcatttaatcctcacaacagttctatgaagaggagatggagagaagttaagtgacctgcccatagagtgatttaaaccagtattttaaatttctagtttgcagaaagtatgtgattctcttaaaataaagattgtgcgttttttggagggagctagcttgtgtgttttatttgattttcaaagaaatctctgacccccaaaagataaagtagaattatcaagccattcacccaagagccaaggagatatagcaagctatgtaaatatttataaatatttattagaaatgttttgatgagatttgagcccaggcagtctagctctggattccattaaccttccctgataccaccactcttaattttagtatatgttttacttttagtaaagaacttttatcagaggtttctaaaacttgtatgtatgtatatgtactcatttctaattcagttttaacttttttgagagcaggtatgtgtgcatatggttatattaagggatgaaagaaagaaataaaaggccaagaacagttccttgttaattttgaagcagtatagtataaagagtcagtttgggtgtgaatagtgtctctgctgtgtactggctatgtgtcctcaagcaagttgcttaacctttctccttattgctgaaatgaggatagtgtatgtatgtgtgtgtgtgtgtatgtgtgtgtatatatatatacacacttgtgttttatatatatatatatatatacttgtgttatatataccctgtgtatacacacacacatttatgttactatgaaaatagtggccatgtgagtaaaatgtgtatagtatcgtgtatgagtttttctttcattacctctaaccattagttcttgctgttccctagggttttattctccatttttctttactttcatacttatgctgggccatattctcaatcctcgtgacttcagtgactctgtaatgtttatcttcagtagaggtctccctgatgaactctagagcctcaagttttagtaccaaccagaagtctctacctggacgcctgagccgttgcatttagcatgttagaatttaagactccccttatccctgctatatatcagttattaaaataagaaacctggatgttatcctagacctttttgttgacttatttgaatctgttctttctatttcactggtaatgctgccttagttcaggcccacattatttcttatctaaactcttagtgatttctcttctagtacatacctttacttcctccccacccctaaacagtattttaaaacagggataaatcatagattattctaaacaattagaagagacaatatgggtcattgtcttaagaatttattgtctgggtttaccaaaagctttatgtgaacaaatagcattggagatgttggagatgggagttgtgaccatccctcatgtaacatggcagcaggcaatctttctgattgtatcacttcctcacttacctaaaaggtaaattccttatttcttaacatgatatacaaggtctttgaacatctatatcgtgaccttactcaactcatctctcctttctcacaggctatctatgttctagccttgcccaaagtatttgcagttgtcagagtatgttgtattatccctgttaatgtaaataccttctggaatgcctctttcctaccctccacccctgctctatttttgttagttgagttctttttcattgtattatctctgctcnnnnnnnnnnnnnnnnnnnnnnnnnnnnnnnnnnnnnnnnnnnnnnnnnnnnnnnnnnnnnnnnnnnnnnnnnnnnnnnnnnnnnnnnnnnnnnnnnnnnnnnnnnnnnnnnnnnnnnnnnnnnnnnnnnnnnnnnnnnnnnnnnnnnnnnnnnnnnnnnnnnnnnnnnnnnnnnnnnnnnnnnnnnnnnnnnnnnnnnnnnnnnnnnnnnnnnnnnnnnnnnnnnnnnnnnnnnnnnnnnnnnnnnnnnnnnnnnnnnnnnnnnnnnnnnnnnnnnnnnnnnnnnnnnnnnnnnnnnnnnnnnnnnnnnnnnnnnnnnnnnnnnnnnnnnnnnnnnnnnnnnnnnnnnnnnnnnnnnnnnnnnnnnnnnnnnnnnnnnnnnnnnnnnnnnnnnnnnnnnnnnnnnnnnnnnnnnnnnnnnnnnnnnnnnnnnnnnnnnnnnnnnnnnnnnnnnnnnnnnnnnnnnnnnnnnnnnnnnnnnnnnnnnnnnnnnnnnnnnnnnnnnnnnnnnnnnnnnnnnnnnnnnnnnnnnnnnnnnnnnnnnnnnnnnnnnnnnnnnnnnnnnnnnnnnnnnnnnnnnnnnnnnnnnnnnnnnnnnnnnnnnnnnnnnnnnnnnnnnnnnnnnnnnnnnnnnnnnnnnnnnnnnnnnnnnnnnnnnnnnnnnnnnnnnnnnnnnnnnnnnnnnnnnnnnnnnnnnnnnnnnnnnnnnnnnnnnnnnnnnnnnnnnnnnnnnnnnnnnnnnnnnnnnnnnnnnnnnnnnnnnnnnnnnnnnnnnnnnnnnnnnnnnnnnnnnnnnnnnnnnnnnnnnnnnnnnnnnnnnnnnnnnnnnnnnnnnnnnnnnnnnnnnnnnnnnnnnnnnnnnnnnnnnnnnnnnnnnnnnnnnnnnnnnnnnnnnnnnnnnnnnnnnnnnnnnnnnnnnnnnnnnnnnnnnnnnnnnnnnnnnnnnnnnnnnnnnnnnnnnnnnnnnnnnnnnnnnnnnnnnnnnnnnnnnnnnnnnnnnnnnnnnnnnnnnnnnnnnnnnnnnnnnnnnnnnnnnnnnnnnnnnnnnnnnnnnnnnnnnnnnnnnnnnnnnnnnnnnnnnnnnnnnnnnnnnnnnnnnnnnnnnnnnnnnnnnnnnnnnnnnnnnnnnnnnnnnnnnnnnnnnnnnnnnnnnnnnnnnnnnnnnnnnnnnnnnnnnnnnnnnnnnnnnnnnnnnnnnnnnnnnnnnnnnnnnnnnnnnnnnnnnnnnnnnnnnnnnnnnnnnnnnnnnnnnnnnnnnnnnnnnnnnnnnnnnnnnnnnnnnnnnnnnnnnnnnnnnnnnnnnnnnnnnnnnnnnnnnnnnnnnnnnnnnnnnnnnnnnnnnnnnnnnnnnnnnnnnnnnnnnnnnnnnnnnnnnnnnnnnnnnnnnnnnnnnnnnnnnnnnnnnnnnnnnnnnnnnnnnnnnnnnnnnnnnnnnnnnnnnnnnnnnnnnnnnnnnnnnnnnnnnnnnnnnnnnnnnnnnnnnnnnnnnnnnnnnnnnnnnnnnnnnnnnnnnnnnnnnnnnnnnnnnnnnnnnnnnnnnnnnnnnnnnnnnnnnnnnnnnnnnnnnnnnnnnnnnnnnnnnnnnnnnnnnnnnnnnnnnnnnnnnnnnnnnnnnnnnnnnnnnnnnnnnnnnnnnnnnnnnnnnnnnnnnnnnnnnnnnnnnnnnnnnnnnnnnnnnnnnnnnnnnnnnnnnnnnnnnnnnnnnnnnnnnnnnnnnnnnnnnnnnnnnnnnnnnnnnnnnnnnnnnnnnnnnnnnnnnnnnnnnnnnnnnnnnnnnnnnnnnnnnnnnnnnnnnnnnnnnnnnnnnnnnnnnnnnnnnnnnnnnnnnnnnnnnnnnnnnnnnnnnnnnnnnnnnnnnnnnnnnnnnnnnnnnnnnnnnnnnnnnnnnnnnnnnnnnnnnnnnnnnnnnnnnnnnnnnnnnnnnnnnnnnnnnnnnnnnnnnnnnnnnnnnnnnnnnnnnnnnnnnnnnnnnnnnnnnnnnnnnnnnnnnnnnnnnnnnnnnnnnnnnnnnnnnnnnnnnnnnnnnnnnnnnnnnnnnnnnnnnnnnnnnnnnnnnnnnnnnnnnnnnnnnnnnnnnnnnnnnnnnnnnnnnnnnnnnnnnnnnnnnnnnnnnnnnnnnnnnnnnnnnnnnnnnnnnnnnnnnnnnnnnnnnnnnnnnnnnnnnnnnnnnnnnnnnnnnnnnnnnnnnnnnnnnnnnnnnnnnnnnnnnnnnnnnnnnnnnnnnnnnnnnnnnnnnnnnnnnnnnnnnnnnnnnnnnnnnnnnnnnnnnnnnnnnnnnnnnnnnnnnnnnnnnnnnnnnnnnnnnnnnnnnnnnnnnnnnnnnnnnnnnnnnnnnnnnnnnnnnnnnnnnnnnnnnnnnnnnnnnnnnnnnnnnnnnnnnnnnnnnnnnnnnnnnnnnnnnnnnnnnnnnnnnnnnnnnnnnnnnnnnnnnnnnnnnnnnnnnnnnnnnnnnnnnnnnnnnnnnnnnnnnnnnnnnnnnnnnnnnnnnnnnnnnnnnnnnnnnnnnnnnnnnnnnnnnnnnnnnnnnnnnnnnnnnnnnnnnnnnnnnnnnnnnnnnnnnnnnnnnnnnnnnnnnnnnnnnnnnnnnnnnnnnnnnnnnnnnnnnnnnnnnnnnnnnnnnnnnnnnnnnnnnnnnnnnnnnnnnnnnnnnnnnnnnnnnnnnnnnnnnnnnnnnnnnnnnnnnnnnnnnnnnnnnnnnnnnnnnnnnnnnnnnnnnnnnnnnnnnnnnnnnnnnnnnnnnnnnnnnnnnnnnnnnnnnnnnnnnnnnnnnnnnnnnnnnnnnnnnnnnnnnnnnnnnnnnnnnnnnnnnnnnnnnnnnnnnnnnnnnnnnnnnnnnnnnnnnnnnnnnnnnnnnnnnnnnnnnnnnnnnnnnnnnnnnnnnnnnnnnnnnnnnnnnnnnnnnnnnnnnnnnnnnnnnnnnnnnnnnnnnnnnnnnnnnnnnnnnnnnnnnnnnnnnnnnnnnnnnnnnnnnnnnnnnnnnnnnnnnnnnnnnnnnnnnnnnnnnnnnnnnnnnnnnnnnnnnnnnnnnnnnnnnnnnnnnnnnnnnnnnnnnnnnnnnnnnnnnnnnnnnnnnnnnnnnnnnnnnnnnnnnnnnnnnnnntgtgtgtgtgtgtgtgtgtgtgtgtgtatttgtgtgtgtgtgtgtatatatatattttttttacctgaagcctttttttttttccttgccactgttctggctagagcctctagtacagtgcttactagaagaggtaaaagcagacattcttgttcttgctcctgattttaggggcaaagcattcagtctttcatctttaagtatgatgttagtcttgggtttttcacacatgtaatgttatcagttgaggaagttctcttctatttctagcttgttgaagcatttttatgaaagggtgttggattttggcaagtgctttttctctattgacatgattatgtggtttttgtttttattaaaatggtgttttatataagttgatttttgaatgttaaatctaccttacatttctgagattaatctcacttggtcatagtgtataatcatttttatatgttgctaaacagtactttgttaagaatttttgcatctatattcataagggatattgatcagtagtttgttttgttttgtttttgtttttcttgtcatgtctttgcttttagtatcgggtaatattggcttcatagaatgacatggagaagtgttccctctgcttctgtttttaggaagagtctgtgaagaattggttttaatatcaattaataggaactatttagataaatagtgtagaactggtgtgtgccaaggagtacagagtattttaaagacttggtgatgtttaatagcacagtgtgtgtagaggagatacaagtagtttgaaattgctggtatataaagttggggtagtggggatggtagtggagatgaggctaagaaagtagaagtgggttcataaatgattaggtcaaagtcagcctcctagtataaaaataattttgtaggccgggcatggtggctcacacctgtaatcccagcactttgggaggccgaggtgggtggatcatgaggtcaggagatcgagaccatcctggctaacatagtgaaaccccgtttctaccaaaaatacaaaaattagccgggcgtggtggcaggtgcctgtagtcccagctactggggaggctgagacaggagactggcgtgaacctgggaggcggagcttgcagtgagcagagatcacgccactgcactccagcctgggcaacagaacgagactgcatctcaaaaaaaataataataaaaataataataattttgttgtcattgttgttctttttcaattagatgaaaaccccaaattacagaaatggtaccttgatcaggttgacaatatacaattctcccctcttttcctctctctttaccttgctatatgaaaattactgatagaagggaattttattcaaggaaataaagtgattacctatctaagctcacttggtctgtcttccttaaagttttatgttgatgtcttattaaagtggtttattgattatctggatgaaacttgactgatgaaatgctaacattttcaatggagtgtgacctagagaatgaatatataagtaataataaagctcttgagtttgaattatcaggacctcctcataaaatataaatgttactaacagcaaatgaggtggtaattatcatctgctcaaaaataaaggagtttcttttgaatatcacttgtcatctgtttttatgttattttactatttcagcaaaactaaaatgttattatatgcatattattttaaaaattacagaatggagtaaattaaaatgaaatcttttttaccctagtccctaaattccctaatcccacttttaacagatataaatttcttatatgcctgtatgagcacatacgttatatgtaaatgtaataacatattatattattttggagcatgttccctctttacaacaatacagtaatagggctttttatgtctatagggacagaccctgcaaagtttcccctgttgttaagatattaatatggtacatttgttacggttaattattatagtttattcagatttccttagtttttgtctaatgtcttttgttttgtttatgatcccatttgagataccacattacatttacaaagtagaagaaagcataacacattgaggatcacacattacaatgtaatgagatgttagtggtcttatcttacttgccttttcaccgtggcagtttcttagactttccttggttttgatgatctcaacacttttgtggagtactggtcagatgttttgtaggatgccttactattggagtttctctgcttttttaatgataaaaccagggttacatgtttttggcaagaagacaacagagaggtaaagtgtcattttcatcacttcgtatctaggacacatgctttatgactgctattaactgactttcaacacctgactgatgtagtgtttagttttcttgactgtaaaattactctttccccccctctttccatactttattccttggaaggaagtcactatgctgcagagactacacttaaggtgggaattatgcccctgtacttcttttccttaatggtggagtagctacacaaattatttcaatttattttgcataagggacatatctcttttcccccatgtattaatctagtcatttatttctatcagtgtggatttatggatatttattttattggccaaattgtcctgggtttggccattgggagttctgtcagctagctcctgtgtttcttttttgtttgtttgttttttgttttattattattatggttattattttatgagagagtcttgctctgccacccagactggagtgcagtggctccgtctctgctcactgcaacctccgcctcctgggctcaagcgattctcttgccttggcctcctgagtagctgggattacaggtgcctgccaccacacccagctcatttttgtagttttagtagagacggggtttcaccatgttggccaagctggtctcgaactcctgacctcaggtgatccgcccacctcggcctcccaaagtgctgggattgcaggcgtgagccaccgcgcttggaggcttctgtgcttctttaacatactatcatgtgggctttttgttttattttaaagcaagtttttgttttctggcactataagataatggcatgtagatgtggtgtttttaattcttgctcttcacaaattttatgaatgcatgagcatgtacacacacagaattgttttcatagacgtaatccctaaaagtgacattgctcagtctagttggggggctctgtgtcttcacttctgaattaatgtattaacccattgcctgcccaaaagattgcatgagtttggactttcacaagaattgttatagttcatattgaatgatgatctatttcgatacttagttttctcagattgaattttctttttagtttgatagatgaaaaattctgacttatcgctatctttattacatttctttaattatgtgtgaggctgagcatttttcttgaccatctgttaatacatatttccatattttctttcttggtttttttgtttgtttgtttgtttgttttgcagggagtggggatgagcaatggcatgattttgactcactgcaacctccgcctcccaggttcaagcaattcccctgcctcagcccccagggtagctcagattacaggtgtctgccaccacatccagctaatttttgtattttcggtagaggtagggtttcatcatgttggccaagccggtctcgaactcctgacctcagcctcagcctcccaaagtgctgggattacaggtgtgagccactgcacccagcccatatttccatgttttctatttgaatgctgtttttttcttattgacttccaagtactatttgtactttaaagaaaaacaaatcaggcttttgccatgtgtagcagaagtttatttacttatttatttgccagagtgtcatgattttttttactggattgtgcgagtttttttcttaaggtagtatagatgttttatagttctgtgtaatcaaattggcattatttttctccatggcttagctcttttgtcttccaagatttgcagaaatacccatgttttcttctggcatgttattttcctaaaaaaaaaagaaaagttggtaattttagtgtttattttgttttaaggtgtgagggatgaaacttgccttaatcattgttgtatactaggtgcctaccctttcccatttccttcccacaacctctcaagcaaaaagatactctcttttacctaatccacacactctttgctattaatactatattctcatctctagccagcctggcatacccatcagagaaaagatagctgttttgaagatttttgccagttggaatgcccaacccatttctgatgagaatcctgggttaccgtgatgctgcatttgatgtcttattcctgggatctctaatatgttacattgcattccatcagatttttaaaattatatcatgattctatttaaaaatgtagcctcaactcattttatttccttgacctcagaagttatctggagataacacatcatactaatgtgttttccaaaggtagggtggagttatctcagctgttgttgttacatgtgatcaaaattttatcacttaaatttcttactcagtgtgtggttttaatgtggagttcatagaagagtggttatcagtgattagagaatagtttattaataaaagtaatgactaggaaaactgagccatagaactactccctaaattatacattatgtaatttttttggaagtttctaagtaagatccactttgtataatagcagatttctttcaaaggacttctggcattgacccctttgccagtgttttggaaacctagtatcagttatttgaggttagtagtttcttatgttagtggactccagtgttttcagcacctgcctcccaaatgatactgtgtgttctatttaggttttttttaaattttatttttgtttgtttgtttttgttttgttttgttttttgagacaatcttgctctgtcacccaggctggagtgcagtcgcatggtcttggccactgtgacctctgcctcctgggttgaagtgattctcatgcctcagcctcctcaatagctgggactacatgtgcatgccaccacgcctggctaatttttgtattttgggtagagacggggttttgccatgttgcccaggctggtgtcaaacttctgggctcaagcaattcacccacctcggcctcccaaagtgctgggactactggtgtgagccaccgtgactgacctatttagtttttaaagtttgcaatttgtgagtattctagcgttgtgtctgataatccaaaggagagagattacattaaggaagtagcaagtctgagatgtttcagaaaattatgagtgctagaaatgctgaatcctggtctttcttctcaaaatattagcatcttcagctttcttaattatgttgtgcaggaagcttcaaacaaaactatactttggaactgaaaaatactactgttttccctacatatgttgtttcctagggatggaccctcgggggttattccctgtggctatttattttacattagaacatttataaatttaacaagagcatttattggtgccttcatatttcccatagtgtagtaaattagattgttcagcctgtagcagacatggtttcattaaccttcctttgatgtattctgccgtgttaatattatgaataaaatatgaggccaataaagaaatatcattacttccagtgcagcatgagctgtacaaagtggagtggaattatcttcattgatttgaacacaatacttttgtagcctaatgttgcatgatgtttttcattggttgcatctcaatgttgattctctttgagttctgttcagttatactactttaatttccagatgtattactgtcaagtttgatctggagtttctctgttctctcattctcaataatacattgatagtttgattttagtcatagggcctttgttaaatttcatattgtgggtttggtttatcattccagccaagttctttaaatttttattcagtgtttcattttaagccattcttcctaggtttgtgtcaatcttaggtggctgtgttgaaatcagaggttataaattgacagccaaatctatcccatgatgtgttttatttgacaactttgtttttgttttttaaactagagttttgtactgtgtgatttatcaactattgccccttattgcattatacagtttggcttcacacttttacatttgttgcttagctgttgatggcatttgcttttgcaacctaaaataaatgaaatcgtttataaaaatattgattaggacaagggaaggacagaacttatagtcttataactagaaacatctgttgaacttggcattcatcttttaatcttacatatagtttaaatatacaaaaataaagaaatgtgtgtgtgtttaggatacagaatttcactctgtcatccaggctgggttgcagtggtgccatcacggctcactagccttgacttttggggctcaagtgatcctcccaccttagcctccggagctgctgtgaccacaggaatgcactgccaggcctggctaattttttttttttttttttttttttttttgagacagagttttgcttttgttgcccaggctggagtgcaatggcacgatcttggctcacagcaaactccgcctcccgggttcaatccattctcctgcctcagcctccagagtagctgggattacaggtatgcgccaccatgccgggctaattttgtatttttagtaaagatggggtttctgcatgttggtcaggctggtctcaaactccagatctcgggtgatctgcctgcctcggcctcccaaagtgctgggattacaggcatgagccaccacgcccggccaatttttttgtttctgtttttgtagaaatggtgcttccctgtgttgcccaggctggtctcgaactcctggactcaaatgatccttctgccttggcctcccaaagtgctaggattataggcatgagccaccatacctggttcagcctttatattcttacctgttagtatgattgtttagtaaatgaagtaaattggaatgtagtggtatacacatctcaaggttgttcatagtgtataacaatcaatttagtaaaatagatcattaaaatcaagaaacttagtgattgagtaatagttgaaaaaatggttttgacatctgtgttaatgacctttctgatacctgagactccccattctttgaactctatttaatacagcaatccttttcacaccaattgagcattctgtttatttgttctcttttttagacctcatttacaatgggaactcattctcctgaattttgatctctgcattttttttcttttagccttcagcattactcttgtttcccctagttttgcatatcatcgtaagaaataggatcatcacacataactcattcagcttacatttctttccttttccataatacctaatcacttattttagatttaaaggaaaaaagatacttttttaaaggatgaaaatagctaaaacttgagtattgtgtgttaggtaatgtatttaaagaatttcacattgattatttcttataatatcatgacagttctttaaaatagatactgtcattagctaaatattacagatgaggaactgatgcttagtgaggttaaataacttgctcatagtcacataactcctagtaacagaattgggacttctatatagttttatatgactcatgctaatcttacttcttaattactatgctatatagtttgtctttgtccttgtttcttccttctcctgattttctagaatcttgcttcttcagtttcagttatcccttttccctcttttttctttttttgatatggagtcttgctctatctcccaggctggaatgcagtggcatgatctcagctcactgcaacctctgcctcctgggttcaagccattctcccgcctcagcctcccaagtagctgggactacaggcacctgccaccatgcccggctaattttttgtattttttgtagagacggggtttcaccatgttagccgggatggtctcaatgtcctgacctcataatcctcctgcctcggcctcccaagtgctgggattacaggcgttgaccaccacacccggcctttcttccttttttataactttattctacccttgtctacttagcttacaaataaatttgggtctctttcagccagtaatatcttttagccagtaaaaaatgcaaacaaaaacccagcggcaatgtttctttgactttgctcccctagagttaccaactcccagttctttgtttactttcatcaccagagactttgtgagagtaaattgaattaactacctcctattcctcacctgctacctgctcactcatgaaccaataaagcttgattgctactggcaccatggtgtgaaacctctttttccaagagcatcactgaaccaagatataccaagatattgggtatagatcgaataccctatttttagtcctcatcccgtctgctattgaaatgtttcacagtttcacctctcaccgttagagaaatttcagctttggatcatcgatgttaatctttccttgctttcttgtgcctcttagttttttcttcatgtttgctaagtcccctatgttacctgcttcttaaatttagtgtttttcaggattccatactcagtcctttccttactcttcaactctgcgtcgtcttcttaggtgaacacgtctattctcatggcttcagctattgcctgaatctcaagctgtactccactcctgcttcctgagttttgccttgacctctgtttgcaaccacctatgtaatatagctacccaaagtgttctgagattcattaagtaaaagttcagataatttttccttcagacctttctactctttttgctttctatgtctcatcacctacttagttgcccacactttaaaacagttaaattaatcccagtctctttgtttcttgggttctctattagtcttatgttcaactagccagtatacctacactaccttctccctgctttaaaaaaaaatccctattgccttatgccctgatccagcctttggattcttgtagaaggtttccagctgcttaccctgcattcattctcatcttcccaagtctcctcctctccatatccattttccataatactgtttgagttaaaacagacatgtcagtttgtaatctaatttttttcttcaagctttattgatataattgaaaaataaaaatgtatatatttacagtgtacaacatgatttttatatgtgtatacattgtgaaatatgtaatactaagttttaaagaaatgcccattgcccctaaacttaatttagccagcaaatatttactgagtacctactgtgtgctaggcactattctacatagagatagagcagtgaataaaacagacaaaagcctttgccatcatggaaccttgtctagtcagaggaagcagataaaataaactgtgtggttagaaaatgtaagtttcatttacttgtggtaagtttcgtttataaagtgggaaaggaagatggggaatgtggaggtggaggaatgagttggaattttaaatggaatgattaaggaaagccatactaagaaggtaacactttaaccaaagattttgaaggagttgagacaaatgagctttgagcatgtctggggggagaacattctaggttaaaggactagaagccctgaagtacagaatccctgaatgtgaaaatgtaccatatgtgttcaagaaatagcagagaactagcttggctagagaaaagttagcagtgaggacagcagtggagtagaggaatagaggacagaaataatgagatgagtgtttagtatcttatagaccaattaggtggagtagaagagatacagtctaatttaacttgattttagttgatagtagactggaaaggaataaaggtagaagcagaccatttaggaagatattacagtaatccaggtgaaagatgatagtggcttagacaagggttctagcagtgaaaatgatgagtggttggatccggataaattttaaaggtagaaccattcatattttctggcatttggctatgagggtgtgtgtgtgggtataggtgtgtgtgtgtgaaagtgtaagagagaaggggctgggagttgatttaggatgattctaaggtttttagcctgagcaataccagatacacagttggatatactagtgtggagttaagggcagaagtctagtatatgtgtatatatttataatcagtatatagtagtattgagccattagactggatgagattatcaaggggaagtgagtttaaagaatagaggaggtctgaggactaattccagggatcttccaatttttaacagatcaaagagaataggaggaagtagaaatggagaaaagaagagttgtctgtagggtaggatgaaaaccaaaaaagtacagtgtcctgtgaagtgaagaaggtgcttcaatgaaaggaacatgattgacttttccaaatggtagtgctaagtcaagtagatgagaagggtaagatgatgactgaaaattggctttggattcagcaacaaggatattgttgatctggaataattttggcatagtggtagtgaaattctcttggcgtaagttttagaataggaggagagaggaattagagaaagtcagcttaaggagaggaggcagaaatatggatagtttgttttttcagatgggagaaataatagtgagtttatgtgctgattgtaatgtttccacacggaataattaatgcagaatgacaaaaaaaaattctggagcaatgaccttgagaacaggaccatttttgtttttgttttaacatgtagcaatgtttgccttaggaaggagctgggttagcttatctctagatatagaagtaaaataagagtatacggagatagatgctggtaggttagtgcttgtagtgatgcaagcaaggccatctgttgaggctgaggacagagaaggggtgttagaggttgaagaggaggaaagaagaaattaagtggtctggaaaagtggatggaccaggaaagtgtataattattgctggacgaattgattttgagacaagttgtggctctgtcacccagactggagtgcatggtgtgatctcggattgttgcaacctttgcctcccaggctcaagccattctcccacctccttctcccaagtagctgagactacaggtgcacaccaccacgcctggctaatttttgtattttttgtagagatggggttttgccatgttgcccaggctggtctcaaactcatgagctcaagcgatctgcacacctcaacttcccaaaatgctgagattacaggtgtaagctaccacgcctggccaacaaattaaattttgatgatgactttaacataagaccaatcaacataattagaggtttctttgcagccatattcagctctttggtcgtagacatggactgggcagaaaactgaactcaaccagggttgtggaaaaaccaaaagctttttcttaaatatttttgcctttgcaggctatctagtctctgtcacaacggctcagttctgtcactgtagtccaaaagcagccatagacaatacttagctgaatggcataactctgttccattaaaagtttatttttaaaaacaggaagcagactattcccgtggtttgttgacgcttgtcttagaaagagaggataatgatggaccgtggaatttaaggctaaggaaggaaaggaggagaacataagtgcgtgaagtgtagtgagaaggtagtagggtcagtggcatgatgtttcactatttcctgatctctgctgtactcttacgtgaccttacattttgaatatagttttctctgtctgtgtgaaatgctcctttcatacacagtttagatgtcctttctttaatacttttatttcctctgctgtggccactgatatatggaaaatgctcaataaatgctgaaacttgaaattctcacttcagtttggtaggtaagattatttcaaattgggagattgtgaaagtttgcttatccacagtatttcccactcagtagccaattctatacttgaacatggtgattctcaactttgttttctacttcggtttacctgatactggccacataaacgaggtaagggcagtgccctgctcctccttcctacttggtgcttaagttagaatgcctttctttttctccactgatgctgggttggtgtctgtatgctgctgagcatggatatttgaacatatgacctgtaataagcttgtgagtatggtaacacgttgccttataggttattttttatatttcagttaattatagaagacaagtggttgttctctcagttatatactatcaggtaaatataagatctttttttgtgtgtggaggttagagacattttggactgtttagtcttacttttcatattgtagttaaagaaactgaagcctagagatgcaagtgacttgcacacaccaactagtagagctagggctagaaatccatgtttcttagtttcagattcagtactctccctgccactatgatacttatcttaataggatatgaggacattgattatcagcctagaaaatattaaattttatgatgggtgatatcgtctaaaatcatggtaaccaaaataatcgtttaaatgtaattgggaatcttaacaatattgaaatgactattttttccccattgaattattagtaaaaaggtgtggttgacttgtttttattattatggttatattctgaagtaattttatataatgaaaattaacacattaatctttaaaaatccaaataagtaaatgtctagagaatttaatttgaatatttaaaaaccagtttctaatctgttttgttttttctttttttaataaactctttcagaaagatgaggtctatcttaatctggtgctggactatgttccggaaacagtatacagagttgccagacactatagtcgagccaaacagacgctccctgtgatttatgtcaaggtatgtaaaaacagaacaattttccattttagaaaacattttttatgaaccaatgagagcctcttgtatgttttaactatattattgtatttaatactcagggagaaaaactgtaaactaggtattgttggaactttgttaaatccttttacagttttaaaatgtgaggtgtgcaccttttgaagttttataactcagatagtaaagatattctggtaaattacagtgaatatttttgacagacatttatagattttatttcttctagccatagtacatttttatttaacttctgatatctttattgtgccacaaaccaacataggagcatatcatataaaattgtaaaatatagttataaatatattccaattcatttgttcataaatgcaatttatatatttgttggcatctgtagctacagcttaaactgttggtgattttaaatgtacactggatgttgtttattttttggtatctaatatcagtgccatcttgtttatttgctagaactcatggcagaatggctaggtatttagcatgatttttattaaagttgtggttaattatagtaacaaattattttattaactatggcattgtgaaaactagtagttaagtttgaaagttcagatatctaaatacaatttttaaatttaaccctttatggaaatgagtatagaaaataaaatgacaatgactctgaatgtcttgtggttagagtttttgaagtcttaattgttaaaaatttatgcttcacaataataaaagggttaccaaagtaggaacattaataatagaagttctttgggtgaattttgtatgagctaataataataataataataataatagaagttctttaagcatttttgttagctagattactttggcaaggagtccgggattcctgctgaatttagtacgaggaattaaattctgatttcagtataattttatttgggcttatcaaaatttggttgaggttatagttgaactgatgatagtagaagactaaaagaaacagttttctactacaaatttactgtagtactttattctggttttagaacagcaggtcctattctagataactagcacagcagtacattcctttgaactgtctaagtctagaataatttttgagctgcttaatttacattatgatggtctgggtctgcctattctgtggctgttagtgctagtacagagaggtggcacatttatgaagtagaagaaaccctaaatttggttcctgaagacctagttttgaggcaaaaaattagttatatccttctaaatgggtcactgatccattctctgcttagctttcgtgttggtaaaattgtactcatttatttactggccacaatataccattttggcccataggatgagcttagcatatgagaaaacatttggaggctgtaaagtagaagtaatagaaggtcctaacaatacattaaaagtgaccagatttttgttccacatctttgattcagccagtaaatggtaaattattgcagaataatctgaagctaatgaaatattttagtcttcttctaataagtagaaaaaaatggcacaaacaactataaaacaagacaaaatgtatgtattatgaagtggtgaagagtctagaaatgtcatattcttttctattggcagaaacaacaggcgtataatgatacctctgttgaaacaactctccaaatttacttatctcttcatgacctataatgatccctagttaagcagtacatattttctgctacttcttaagatatgtcaaatgattttctgttcatatatctgcctacagaaattttgcttatttcaggatctttactcattctaaacttttgtttttattattggagatttcaagcatatataaaagcatatataaaaagagagaaaatagaacagtgaacctccatgtacctgtgagacagtatcaacagttatcaattcgtagccaaaattattttatctataccattttctactctgcactccctttatttttttgaagcaaattctagatatttttactttcacatataagaattacagtgtgtatgtgtgtatataaaaaagtatatattatatgtactgtatatattacatattatagtatagtgtatatattatagtgtatatatactatatatgtatacactatatatagtgtatacactatacactattgtgaatattgtgaaaactagtagttaagtttgaaagttcaggtgtctaaatacaatttttaaatttaaccctttatggaaatgactgtagaaaataaaatgacattgactctgaatgtcttatggttagggtttttgaagtcttaattgttaaaaatttaagcttcacaataataaaagagttaccaaagtaggaacattaataatagaagttccttgagtagattttgcataagctaataataatcataataataatagaagttctttaagcacttttgttagcactccttgttggcaaggagtcatatatatagtatatataatatacactatatatatagtgtatgcactatatataatgtatatatagtgtatataatatatatttatatataaagtgtatatatactttatatatatagatagataaggatgttcttttttatttccttccttccttccttccttttcttcatttactgaaatttataataattagtcaattccatagcatcctccataggtaccagtgaggtgttttgttttttgttttaaaatatcttgtgtgagtgttaataatatttgacaatttccttgctttctaacatgacaaagtattccaggttcatcttacacattcttcctcagacttagaatcaaccttttcttcaagaagaccttgctctttgagtgggaggtggtatttagagaccacagtctggatgctagaagtgctaactgtcacaggattggttattgtttctgggtctttttagtgaacagagctaggaaatatgtggataattttctcagatgtaatgcatctttttttttttttctgaaaataaatacaccatgagttcatattgatactttcaaataaaatttatgagtttttacttaactgtaataatcttatatttgtatttcctttctcttacattgaaaatttcatttctcaatgatagcagtatatttaataacttattctaccctgcaccctacataactgtcttagaataacaattccaacactagcaccaccagctaaaaataatttaagatctaagcacagctcaattttacctgttagatctcattagggatgaacaatcaaatgtctctgttctaaagaaacactgaggccaggcacattggctcatgcctgtaatccagcattttgggaggccgatgtgtgcagatcacctgaggtcagaagttcgagaccagcctggccaacatggcgagaccccacctctactaaaaaatacaaaaattagctgggcgtgctggagcacacctgtaatcctagctactcaggaggctgaggcagaagaatcacttgaacctctgaaacggaggttgcagtaagccaagatggcgccactgcactccagcctgggtgacagagcgagacttcatctcaaaaaaattgaataattcctctctgtgtgatgatgttctattaagcatttgtttgtttcagtttacttttattatagattgtggttttctaaatttttaaataaaatttacttttaaattaatatatttatacatagttcaaaataagattgacagaacaaggttcaaagaagtttagcttttatctctgttccctctgctctgttcctttcctttaccagtgttaaatattttttaaatgttaataatttatcctaccatttttaaaataagcaaacatgcaattattcttaccctgtttttatataaatggttacataaagtacacgtttttctctttttttcagttaaaaatatatcctagagatcagtccatattttcatgtgtgtgtatatcaccttcttcatggctaccatattacttcatcatgtgactgtattctagttaattcacccagtgagctattaatgcacatgctgttttccccttgttttttgttgtgtttttttgggttttgctattaaaaatagttctatagtgaacaaccctgtgcactaattgtatttttgccagcaaatagttgagctagatatctggcattatgtattttaaaaatgaaaataaaattattgtacatactgaggttggcatacagagagagatctagcactcctttctttctccccgttgtgggaaaagggttttgttttgttttgttttttaatgtaaccacagccctttcagaggccagatctattggctctgggcattattctttggggacatagatcccttaaaggtctgaaaagatgaaaacagtgtctggaattgatgagttatgagttgatctccttcacatggtcattctacatagttttattgtaatcctgttgtatgaaaaatgttagattgtgagagggatataaaagtagtaaatgcaagtaactcttgccttcatgcacctcatcatctgatacggacttgtttggcatacatgccaccagaatggcaactgcatttctttataattgcctttcactttttctgggagagttgagtatgttctgtgagcaagatacaggttaaaaactttttgagcacctttgcttttctgatgagtatatttcagaactaagtaggttttaaaatgcaactctaaaacagatgactggcaaatcattgttgtgaacttaataatttttttttggttgaaaagacatgtttaaggacagggtctgatcacacaagagagttagatgcattttttgaatcataaacaaaattggtattacttgttttaacatgtattctattacttgctttattattttattacttcagatattatggcaccaagaagagggcattcgatttcagttacatataactaactgttcgaattgtgttcaactgcagagtacattcccttctgtgatattttgtcctgtaacctgaagcatagtaattattttatagaaatgttaacaattttgtatgaactttgaataaaatgaaaaattaaaaaaattgtgaccattgaacctcaatatcttctgcaaaactggggataatgtgtatctcacagagtagttgcaagaattaagtaaacaaataggcagaaatgcttttcttggtttagcacttagtacatgttaaatctgttacatttcaaaatgtgttaatttgagtttctaagaattaatcattctagtattttatttagccaccaacctgcctttgttttgttgttgttgttgttgttgttgtttttgagagagagaatctcgcactgtggcccaagctggagtgcagtggtgcaatctcggttgactgcaacttctgtctcccgggttcaagcaattctcctgcctcagccttcctagctgggattacaggcatgaaccaccaagcctggctaattttttgtattttagtagagacgaggtttcactatgttgcccctagggtggtctcgaactccacctgccttggcctcccaaagtgctagggttacaggtgtgagccaacgtgcccagcctccaccaagctatttaatgattatattttacacctttatttaataaaatatggcaaaatacatgaatagtaattgaaagagaagcacttactcaaaccactacagaatattgtgtatgtgtgatattgagcaagttgcttaatctctctgggcctcagttattttatatttaaaatggcaataatattagtacttattacataaggttattatgaggagtaagtgaaataatacacataaagcagttaaaacagtgcccagcacataagttgtttttctgttcttgtttttgctgtctttctagtctagaaagcttcttggctttcttataaatacacttttacaaagtgaaacaacaacaaatatataatattacatatttcttttttttccccctgttggaaacttttatatatatatatactttttaagttctagggtacatgtgcacaacgtgcaagtttgttacatatgtatgcatgtgccatgttggtgtgctgtacccattaactcgtcatttacattaggtatatctcctaatgctatccctcccccctccttccaccccatgataggccctggtgtgtgatgttccctttcctgtgtccaagcgttcccattgttcagttcccacctatgagtgagaacacgcagtgtttggttttttgtccttgcgatagtttgctgaaaatgcttcatccatgtccctacaaaggacatgaactcatctttttgtatgagtattacaaaatatattttttgtgtagtattagtattccatggtgtatatgtgccacattttcttaatgcagtctatcattgatggacatttgggttggttccaggtctttgctgttgtgaatagtgctgcaacaaacatacatgtgcatgtgtctttatagcagcatgatctataatcctttaggtatatacccagtaatgggatggctgggtcaaatggtatttctagttctagatccttgaggaatcgccacactctcttccacaatggttgaactagtttacagtcccaccaacagtgtaaaagtgttcctgtttctccacatcctctccagcacctgtttcctgactttttaatgatcaccattctaactggtgtgagatggtatctcattgtggttttgatttgctattctctgatggccagtgatgatgagcattttttcatgtgtctattggctgcataaatgtcttcttttgagaagtgtctgttcatatccttcgcccactttttgatgggattgtttttctcttgtaaatttgtttgagttctttgtaggttctggatattagccctttgtcagatgagtagattgcaaaaattttctcccattctgtgggttgcctgttcactctgatagtagtttcttttgctgtgcagaagctctgtagtttaattagatctcatttgtctgttctttatcttgacatttctaaacttttcaagacagtgaagatagagtagatctttcagatgaaagaatacaagacatcttaaaattaacctcatttaaactcttaagcttttttttttttcataaaagaaaacttgttttcactgattcttactgacctagacattaataccctgacacagtaaaatctgtttttagtaaatttatgcctgtgaactcagtttcttattggagattatctttttagtgataatgaattaaactcctagagtaagctttaggacttagaaattgattctgtgaatgatggtacaatagtagaagtatgaagtttttttaaaaaagttatatggatacctaaatgccttaattttaactttgttggcaaaatgctgaccttgtaaaagatcttttctgtacagtttacatcatgcttcattttaaagaagacataaacttttccagctatagttcgtattaacttcaaagatggtactaaaattcagctgtctgcagttttcaccgtgcttcttagaaggaaagtaggtttcatgttaactttaattaacctaagccttagcagtagcttttaaagatggtgccatgtgtcagtgcttcattagacttttaagtatcttttttttttttaattgtttttttaccaagatatttgttgtctttggtttgactgatttcaaaaattctgtccatggtgtaacttcggggtagaggtcagaaggtaaacagccagaaaagtttaaaagtgaatcagaacactgaccttgagatttaaattatactctctttctccatgaagtttctgtcttctgccatcaagagtgtgattctttattccagtttctcaatgcagacccagtttctcggtgtatctttttggtaagaaaactgagaacgtcgtctcttttttaagatgatgtcaatagtcaggcatctgtttttgaatgtcattttgaattatactttttctgaaggatattaacaggaagaatggtggtgctactaacagagttattgatgtcttgatagagcagtgattatagattttctcagtccacatgagttttcctagaccactgtatcaatcaccttggaggctgacatctcagaaaaatatgattctaaagatgacactttggaaatacgtttacatggagcagcgtgccctactagaaagaactataaacttaaaaatcagaatacctggtttctgacccaaagttacttattattcatgatttcggatgcttctctgagcttttcatttgtgttttaaataaaagcccatcttagcaggcttgtaatgtgagatgttagtaaaattaaaagttataaaacacattgtaaaatttcctttcttaagttattaaagaatgatgcgaatagtacatatggttaatgacgctttagctaattcatatagaaatagctaattaatacagaaatgacatgaaatttgtgaaaggaggattgagtgccggtaatctatagcatttcacctgttcttttctgagaatctgttattttattgactgcttaagtattctgatttgtttaggataggaaatatttaattaatttctactatctattacagttatatatgtatcagctgttccgaagtttagcctatatccattcctttggaatctgccatcgggatattaaaccacagaacctcttgttggatcctgatacagccgtattaaaactctgtgactttggaaggtaagctactgtccctctccctgccccttcccttctcccctcctcccccattatcttcttttaaatatattccttttgcaatatcagcctaaacacagtaattcttatccaagaggtataaactagtgcagctgtgagagtaattttgttagtttctgtcaaaattataaatgtatatatacttcttcatttaacactttaacttttaggaattatttccttagaaatacacgtttacaaaatagtgtatatatatggatttttattatagcattgtttataagcatccgttagtaggaaaatggctaaataaattatggtacatacagagtaatacatgcaaccatgaaaaagaatgaggcagctctctgtgaactgaaagggaatgatctctaggaaacattaaatgaagaaagcagatcaagagtatgtgtattgtatgccaccttttatgttttaaaaacatacagagtgtgactatatatacgagtacatgtgtggcttatttctgaaacagtatgtaatccataacatttgattgcctgagaaaggaaactttgggaatataatgtagttgggaaactcactttttcattgattgtattttagtattgtttgagtttatgttagatatatactcctttttcagtaagaactaatttttttcaaaatattgattacattcctgtgtatctttttaacttcacagttaacctcaattcagggatgagataaaaggtctactagcagtgttttcttcattttcctctataatttagccttttattctacccttttttcctgcaaatttcatcaaactttctgcttttaaaaactcattcttggtaatatactgtgaatttgtaataaaactttattctttccattttcagttttcagtacttttgtgcctctctaatctaaccttttaacatgtagtcaagcctatattcccatgtaactcaggcagttaccctgctacttcctcactggtgtaatcacctaatctctctcctcatggtccctaagacatctctacataatttgggttctttccaatttaattttttcatccttgttacaaattctttcttttcaccatagctctatagattacatattgccccacacttgttgatacctatgttcctatccctttgtaatacttttacatcaattcacagtttaaatttggggttcaacataggatatgttttccacaggcttctcttgagatagatcctttaaaaaataagcaaatctgttctgtcatgagttaatttttcttagtctcacaatgaccgtcctcattctactaatttcagatgacctatcactttgcaggccatgactctgttccctgaactatttttaaaaatggtgaaagacaatgaagctcttatttggtgtttgaaacaaagcactactacttgtctataagaaaaactgcccaaatcatttatgttttcttgttaatgggtgtcttccccattgagagtgactgacttggtagggacagactatgagacaccaaggttagaagagcttctgttctcatgatagtgtcagaacacttggtacagccctttctcttaggacataaaatagctttattctgagaatttggaagagggatttcgcttgtttgatagctcatttttataaaccctctaattttttgtttttaacagaattgatttggtcagatagagtttgggaaacactttgggctttacgtatcagattggtaatttgaacaaaatactattactttcttcttattttttcactagatgaaacggggcctaaaagtagctaaaggactagttgggctatttaggaacagaaagctagatgtgatcacaatattgggcaaggagttaaaaccagcctcctctgtaagagaggctgcttcatttttgtagctccatcaagtagtgaaaaaacttcacggtacaaagcttggatattaacattttgtctcgtcatgaattttctgaatataattagaacctatcttgttaattaaaaagtgtcctttagaaggtataacggtctcctatcaattatgctgaaaactaaatgtcataattttcatgcagcctgaaaacagggattagtatttgttaatttatgaaatggttattgtatgtcagtacttggggagagggttgaaaaacaaacttcaaaactagtgatgaaggaaaaacaagttaagtttagagtcatcattgactagaaacaaatggaagaaaagaaagcccagtcattgaaagaaatccttgtgactactttcatctgtctttaccctggttttccagtacctttacctcagcattttcttaccttttttttttttttttttttttttttggcacttactgttttactgttttgatttcattgcattttgtgcctttatttatcttttttattaatgtatgtcagaatggctggcttctacagcagtttattttattctgtctttggattatcttgggcgacatctcaaaagaaattagttgtaatttattatactttgatgtttaaaatacatgctacaaactattttagtaggaaaattggagtaagaaaacatgcaattaaacttactatagcagttaaaattcataggctgtgaatcatttctgccctgaagttgaagggcctgtttataatttattgggtaataaatgtttatgcagttaataaattgaccaagatatggaaaaatagattgagtttataaaccttgaaatattcaccctgagtcagaagtcaaaatgcaatacagtggccaatctagcccttcttaaagaaatacattgggtgaggaatattcattcttagaatctattgtcatgctttttggtgggggagatacctcttttctgcccttgcttctttgtattttagaagtggaatttggggaacaggatcagaagaaattcagcacttacccttttttgcttttggtgccttcttaggtgacaaatgctttctttaaaaattgctattcttttttgcagggcaaggtgataaaattgtacatttcttttgtcagagatagttacagtttacattttctttttcatatatgattcaaatgatgtgaatcttagaaaatcattcgatactgtgaaagggtagcagtctaggttcttttaaggtttagatttaaagaatttctgctttttatttttatttttttttttctgttagtgcaaagcagctggtccgaggagaacccaatgtttcgtatatctgttctcggtactatagggcaccagagttgatctttggagccactgattatacctctagtataggtaagtatgaatctgaatgtaatgctcataattattaattgcttcttgattttagtaatttagtattactaatctgtacttttatttgcattaaaagatagatatatcccataatgtttttttcttaaagcttgagatgcaaacatatataggcatacctcattttattatacttcccaggcactgcttttttttttttttttaaacctctcagaggtttgtgtcaagcaagtctgccagcagtagttttataagagcatgtgcttacttcatgtctttgtgtcatcatgtctttgtgtcacattttggtaattattgcaacatttcaaactttctcattattgtatctgctatggtgatctatgatcagtggtctttgatgttatttttaattgtttcaggttgccacaaaccacaacaatataagacagcaaacttaatcgatcagtgttgtgtatgttatgactattccaccagctggccatgacccatctctcttcctatcctcaggcctccctattccctgagagacaacaatattgaaattaggccaattaacaactctgcagttgcttctaagtattcaagtgaaaggtacatctttcacttttaatcaaaagctagacgtgattaagcttagcgaggaaggcatatcgaaattgtgccagttagccaagttgtgaccacaaaggaaaagttcttaaaggaaattaaagtgctactccagtgaacagatgaatgataagaaagtgaaacagccttatagctgttacggagaaagttttagtggtttggatagatcaaaccacaacattcacttgagccagagcaaggcctgaactccctactcccttcaattctgtgaagacagagaggtgaggaagctacacaagaaaaatctgaaggtagcagaggttatttcatgaggtttaaggaaaaaaactgcacgatgccataaaagtgcaaggcaagcagcaagtgctgatgtagaagctgcagcaagttatccagaagatgtaacgaagatcattgatgaaggtggctacattaaacatcagagttttaatggagaccaaacagtctcatactgtattggaagaagataccatttaggactttcatctctagaaaatctagacttcctccagagaggagaagtgtcattgcctggcttcaaagcttgtaaggacaggttgactctcttgttagggcctaatgcagctggtgactttaagtggaagccagtgctcatttaccattccaaaaatcctagggtccttaagaatgatgctaaatgtattctgcctgtgctccataaatagagcaacaatgagtagatgatagcacatctgtttgtagcatggttcactgaatatttgaagcccactgctgagacctactactccagagaaaagtatttctttcaaaatattactgcttattgacaatgcaactggtcacccaaatgttgataaatacattcgtaaggctatagctgccctagatagtgattactctgatggatctgggcaaagtcaattttaaatcttttggaaaggattcaccattctaggtgtcattaagaacatttgtgattcgtgagagtgggtccaaataacatttggaagaagttgattccaagcctcatagatgaccttgaggtgtgctagacttcagtgaaggaagtctctgcagatgttgtggaaatagcaagcaaactagaattagaagtggagccggaagatgtgactgaactgctgcaatctcgtgataaaacataaacaagttgctttttttatggatgagcaaagaaaggggtttcttgaggtggaatctactcctggttaagatgctgtgaatattgttgaaatgacaacaaaagatttagaatattacataattgtagttgataaagcaacagcaggagttgagaggactgattcccattttgaaagtggttctaatgtgggtaaaatgctatcaaagagcatcttatactacagaaaaatctttcgtgaagggaagagtcaatttatgtggcaaacttcattgtcactttaagaaattgctccagccacatcctatagccttcagcaactgccaccctgatcagttggcagccatcaacatcaaggcaagaccctctgctagcaaaaagagtacaactcactgaaggcttagatgatcattagcatttttttagtaataaatgtttttaaattaacgtatatacattaattttttttagacaattctattgtacaagtgatagactacagtatagagtgaacatatcttttatatgcactgggataccagaagatttgtgagacttgctttattgtgtcttattgtaatggtctggaaccagttccacaacatctctgacatatgcctgtatagagtttttcaaattttacttttcagaatttaaaatatacctactattctgtttttcctccttggactattagaattataaagctaatagcttttaccttaagaatttaaattaattctaagtaactttttgttttttactttcttatttaaaatcctcctgaaatacttctgagtgtgattacactagttggagaatttattaatgttatttcattaagttaataatgaaagtgatagtatggccatattgctaacatttccttcatgccatctccattatttaatataaaatcagcttaagtcactaatagttttgctaaatgcactgattctgtagaagtatgtacccaagatgttagtgatagaaggaactgaatagagaccattagctttaatcatcgttgaccttctcaagtctttaccccagatgtttagtgataggaggaactgaatacagaccattagctttaatcatcattgaccttctcaagtcttcactcaagatgtttagtgatagaaggaactgaatagagaccattagattagcttttatcgtcattgaccttctcaagtcttcacccaagatgtttagtgatagaaggagctaaatagagaccattagctttaatcatcattgaccttctcttctactccattttagcccactagccaggagtgaacagagagagcatgatcagctggacatgaataggaagctaacaaacaaggagcaactttaagctagatgtgcaagtggaaaccaaaattattttattcttatgtattgtttctgaagagaattcctttagtccaaaaacagaaacaaaagcatgcaaataataaacccaaaaaatccccacagtaacagaaaactaaaacaaacaaaaaacagacttggcctggcgcagtggctcacacctgtaatcccaacactttgggaggctgaggtgggcagatcacttgaactcaggagtttgagaccagcctgggcaacatagtgaaaactcgtcactaccaaaaattagccgggcatggtgacatgcccctgtactcccagctatttgggaggctaaggtgggaggatggcttgaggccaggaggcagaggttgtagttaactgagactgcactactgcactccaacctgggtgacagaatgagaccccctctcaacaacagcaacaacaaaaaataaaacagaccttgtgacagttttctgtctttttgatacaaatagaaattctctgatataagcaaacaccctaatcagaaacacattatttttttattttgccaaatggcaaaatgccaagcgcattttgatttctgccaagaggccagcagttttacccaccatttcctttgtaccctcagtacaaatgttaacccagtaaaagtgtattcttgtgaaaagagttttgccctctgggacatctaaaaatgtctagaggacccaggtgcaaagagtacaaagtgtcctctgtagaccacactttgaaatctgctttaccagagggtagagagcataataatatgtatatgtatgtgtatgtaattctcagagtcttcttatggctatggtacatggcatatatgaatggacagatgagaaatagtacaaagaatattttgcttgtggtcgacctaggtttgagcatcaggtcactattgaagtaaagtggagattactgacagttctgcttttctgagtggctgtgaggcttaaataaaatgttagtgaaaatactgtagaaatgtaaggtggtattctttttgtggcatttttagacttgactctcttcaagagcaaatttcagccccttgtctttgggtatatcattgtattttccagctgctttacattttattcaaatatatgatactgattatctatatatactggtgtgagttgtgccagaaacacctaaaataaaggcagtttgattcttctcaaaaagttatcacatcatctcacacattaaggaacagttacacaaacaggagtcttttgaaccctaacaagcctaggtttggcctcccattataaacttaggatacttgctgcttaagactgtaatgtttttaaacagaccccccaaaaagtatactaatatagtgacatttttaaatgtttttaaccataatgtttgaaacaaagagtaactgcttctgacaagattattgtcatatttagatacagccaaaggtaaagctgatgtctctgattatattgtcttactgagaaatggcagaatgagaacaaaaggcttccttagaacaagggattgaacttacagacagacccttgaagaagctgttattctgtgacagtgagacagttattcaagagagtggtgtcttgattgggaactgagaatgattccaggcctagctctactattcagtacctttaccttggggaagtcatttaactttatcatgtcttaatttccttattccatgaaataagtgtgttaaactaaatggtcttgaaagatcactttaacatgaacctgagttaagtatgaaacaaaatgctattctggctttaaccccaactaactaattttcagtgtgccaaagcactatttttatttttccagtaccttctatttagttgaagttttattctatttggagaatttcatccatttctcctttaaaataagagtagaagagattttagtgtcattcagaaagtgattgataaatactttgtttttactaacttgactgatgtaacatgaattgaaggctgctagtatagttgtcacctgaatcttttgagtatcaatcttctgtggtaacttctaggcaagagtatttcttgatgttttactttttgtcttccatatttgtagctaaatcttgcctaagaaagtgtttcctgttgttttttatgaaggcataattattcccctacaattttttcagccttgtattctgagatgaatcattccgtattagagaggaaaaaagttgagtgcatattaccttccatcttattaactaggtaaagggatattttaaaacttggattaaaataagcatttacataaataaggagatacatcttttccacttgactataacagttagtattactgttggctttgagtaaagattccctagcaagctttcatatttgcttcatttatcaatttcctaatatattaaataggattcttggtctatatttgcagaatagatgtcttggttattaacttaggtctgaacaaaatcaacttgagtttgttaaatgaatactatgtcatttttctaggtcaataaaaagtagtcactggagcagtgatttccagtctcccttgatagtacatctcaccacatcagacctttaaaatttttgttgtcaaccatttactgttccttcttctccttccctactggtaggtggtaaagtccagcaatgattcatattcgtctccctaaagcacttgagtgttggtacattagaaacctaggaatctcagaaatctggaagctaaaaagcagccttttcttgtaggaagttttaatagtgggctttaaaatagagtgattgtagtttatcttctaatccagtaatacttttgagagagaaagaggatattactaataattatcccaggataatatataagccataactatcctgggtaaactaggatgtatactttaaagtatttttaaagtgtattaattgagttaatttttaaagttttctctagggattgaggttttcattttgacttaaaagtggattatttttataatttatgaagtaaaatatattcctgtatcttgccattccgttttatttaaaaatgataatatatttaagcacatttttctgtcagtcatcctagaacataaaaatcaaccatttaaagtattaaaagtgttcctcagaatttgcattgacttaaagcccagggtctgggagagattgaacctttccttgctgttcctctgtaagtacctactaatatgcagagattgtgtcactttgaattatttttaagtatgataaatagatagtcctgccatagctttggtactgtaatcctctgtcttgctatttgaagacttgaatacctgaaatttgataataatagactttaccctttattagaatattcttattggtctggtttcctctttggtaagtttaacatttaattaaaaagaacattagggaagttttatgaagttttctctgttttggattgtataatcttttccttgtgatatttactctgtgatcacagtaaaattagaaaatgtatacaaacatttttcagttcaagctataaagtattaataaggctttgttttcttttctctttagatgtatggtctgctggctgtgtgttggctgagctgctactaggacaaccaatatttccaggggatagtggtgtggatcaattggtggaaataatcaaggtgagaaggttgaatcagaatatttgaactggaaggaattttggtactactttaataataatatatcacacacatacacacatgagaaacttaaaaaatggaggaagcaatccaaggtcacatagcaagttcagctataaagtgggtataagaacgccccccagccttttggtttttgtttgagttactctttgcttgtatgattctagaaaagctgttatgtatatctaatgcaagaaaggtatatatctgttatttaaagtacttaaaagcaaaattggactataagctcactaaaatgtatgtaagctgaataaaggcagaagctgtgtctgtttttgctcactgtatactccctgctcctaatactctgtggagcacataggagatacttgtatttggtcactatttatatatattcagtatttataaaatgaaagaatgaatgcctacatgtctggctagatcattgatagaaacatttgacttatggatttaatataattttatttgttgggtctatatggattaaatataattttatttattttaaattttatttaaagctgaatgaaagcagaagatatgtctggttttgctcagacacagcttctgctttcatttagctttgcatacataacacctttattaacagcaaatatttaaatattatcttagaatatatgtttccttttaagaacagtagagctgagtttttaattgagtttttaaatgtaatttttttaagttttaaatatttgaaatcttaaaagaaggccctttacttaaaaacaaacaaacaaacaaaaaaaaaaaaacctagtgtctagatttatatcactagattggttcattctaaggtttcagtttggacaaagcaacaacacatactgtctctggggctttgtttgtgataccccaaatttttcatagaattgtaaaattgaaaaatcttcttagaggtcatgtcgtcctatccaacacacaatgaaataaccttttagttacattcctaacaaatgattttctagtattttcttgaacccttccagcatcagattactacttagggttgcagcttattctgtgttggacagcttgaatttagtttttattatactgagctgtaactcctcagtagcttataccatgaacataggactgtgatcaagttcttttcaaacccttgtacttcattctttaaaaatagggatttttaaaatcaaaggtggttttgctagatgtcattgtgtacaagtattgtgaaaagatcagtgtgtaatcagcaatcttctttattatccatataatttcttacagtttgcagcttagactgctgtggtatttgcatcttcttttggtaccatctttgagtttcagatctaaccttttacccttgttaacagaactattttctttttgatttctatgctacactcagatctaaatttgaatagtttgctttctttattttctttcttttttttttttttttttgagacggagtctcgctctgtcgcccaggctggggtgcagtggcacaatctccactcactgcaagctctgcctcccggattcacgccattctcctgcctcagcctcccgtgtagctgggagtacaggtgcccaccactgcacccggctaattttttttgtctttttagtagagacggggtttcaccatgctagccagggtggtctcgatctcctgacctcgtgatccgctttctttattttctaaaagcctaccccgtcatgtaaattaatgctcgaatacggaacttggctaactttttctgtaaaggactagataaaatattttagactttgtgggccaaaaggcaaaatcgaggatatcatatacgtacttcaataacaaaagagaaaacacattttcacaaatttttttattgatgaagttagaggtataataattgagtactttttttttttttttttttttaaatacagctctactaaccagaagaattgagttctttttgggggaatataacctttaacctttctcttaattgatgttcaaagttagtactttctaatcatcaaattgattgcaaatctgttaattcttagcttatgggcctcacacagacaatggactgtagtttcctgatctctgctcttacacaaccattcagcatttctcctgtccctaggcttttatttgatgtacttgagctcaccatcaccatgctaaaattctctgggcatattggccattctatttgtcatatacgtttagctcattagaattgtatcatttctctactgattatattttagaattttgtggcgatttgtcattaattttaattaattcacaataatacaagtagaatttttgaggaagctaagtgagcatctgtgataattccctatctcatgcctgctgtaataccttataaacctttaggtctagagcttgcttgtaccacttttgttagtccttgtaattcatttttctgctaatattagtttatgctacctgcttaatagattttgttactgataatttcagacttcgttttcattaagcacttattttttgcaaaatgatccatgatcgatatgtagtagcaggccaactctgaaacaaaacgctcgtcatgtgctgtgctgtcatcttgcatttatacttaagaaatatcaccttactacagtaggtaagttccaagatcactgcttataggaggttttgataatgatataagataagagaattgtaagtatttccaagcatccagggcattttgggatatctggtttcgaggtcccttctacgtccttgaccatggctgcccaagatagatggaattaccagtagtagtttaccatccatttattgactggaagttgctacacattgcacggaggctcatgggctttgtattttgtgcaagtgtgtatatgtttagtatagttctaagtcttattgcatgaaggttaataaacttcacaggagtgttgtgtgtgtgtttaatatagccccagatgttactggtccagccaggggcagtagttcacgcctgtaatcccagcactttgggaggccgaggtgggtggattgcttaagcccaggagtttgagactagcctagggaacatggcaaaacccagtctttacaaaacatagaaaaattagccaagcatagcggcacacgtccatagccccagctacttgggagcctgaagtgggaagattgcttcagcccaggagacaaatgttgcagtgagccaagattatgcccctgtactccatctgtgtgacagagcaagactgtgtcaatgagtccatcaattaaataataaatatcacagccgggcgtggtggctcacacctgtaatcccagcattttgggaggccgaggtgtgcagatcacttgaggtcaggagttcgaggccagcgtgaccaagatggtgaaactctgtctctactaaaaatacaaaaactagccaggcatgatggggtgcgcctttagtcctaggaactccagaggctgaggcaggagacttgcttgaacctgggaggcagatgttgcagtgagccaagtgccactgcactctagcctgggcagcagaacgagactctgtctcaaataaataaataaataataaataccaaatcttcttctttctcctttctgcttgcctccatccctccctccttcctattgttgctaacatctgttcctcaaatgttaaatatatacacggtctcatttgaatgaaaattcctgagaaatgctgatctagctattttagttttcatgatacaagttggaaaagagaagttatatgtgtttgttttcaaagttaaatgttattaagacattctgtattttaaacaaatactttcatatactgataaacatgactttaagaatagattcgaaattttcataaaggtggtctcatagatgcccagttcagttctcactttttttaaggtaacagcttatgataactagggaactcgtattaaactgttcttttctgctttcttttcattttctcccttgaaaacctcgtaatagagtatctgggggaagctaaccttgcaaaaataggtaacttctctgaatttgagtttaagcaagaaaaaggaaagtgaataatcatataataaactttatgaagttttttttatgtggtagacttgcctcattattttataaacttttgcctcattattttataaactttctgagcagggactttttttattcttgtgttttaatatctgagggcaccaaaataattttcagttaaggtttgtattgaattaacttgttaaaccattgtccattcatgaatttgaaattagctgggaattaataagaaaagttaatgtggttgttgtgtatgttgtttattgactcagatgtctatgccaataatttacagcatgagtaaaacagtttaattaaatgaactttatctcattctagctaacatttttcgttttcctcactgccctctaataagaaggtttttctaaaatatttagagtaaaatccaaatacattatattaaattaaaagtataagaacagatttgaaagtcatggaaaatcatttctaagcatgaaaaacacaagtatttaactttctgaagttaatttcatgcatacaattgtcagatcatcatttcgttatgccgtttgacctctacatatcaaaaatgcatggattttcacagcatttgtaaaaagacaaattccgttagggacttctcaatgtgcttttttcctttaaaatcttccttaatataaaaatctcaagaaatatctgatatagttccagaaacatgggaaaaaaataaaacatttttagaaaacctctaccaggaattttgccaaacataatgttcactgacgtataacattgtcctttggcacctctgcagttggccatagcagtggagctttatagaagagagtcctgtgaaggattgtataatgctggtgaagataatagtttttaatgagagtcactttttttataactacatagtcttagattttatatgctcaatgcagaagaaagagtgagaaagcacagagagacaaatagacaaaaaatcacttactgttctagcacatcatgaaagatacttctataaatattttcatatactatattttctttttatttaaataaaaataccatcttactgctttgtagacttttaaaaactgaacaattaagtatatttttaatgattaaatagattgcactgcatgattgtatttcgaattatataattgattctgaaaataacagcattaaggtaaagtgatacagcattgtctttcaaaaagtttacatgatacattggctttcctaagtttgattattaactttcttacataaatgacaagtgtccccaaaaaattccatataaacaatctgggaagttttgaatctgagaatgctgttaagttttactaataatttctcccctccactctccaaactttaaaacataaatttcaaataaggtaagatgaactttagtccagagttttatttctggattaaattttcacaaaactaacaattttaaaataaaccaaccatttgtagaagtttttaattttaaatattaaaattcctacagagatagtttcatctccacctcttgataatggaatttcagtataattttcatagttttcgtaactgccctatagaatttgggtatatctcttttaaaaagcttgacattaaacatattgaatcttaaattatttgcaataataaaattataaggcagttaaagtttcttaatttcttttctaatacaactttactaaactactgtttagttttctcttaacatttaccaatttagatgtctatgtagatagctcttacgcagggaagagctagtaatttcggttatctctaactgcaattttatgtaagaaatttgaaagtgcaacacagatgcaaataaacttttgattatgctatgggagccaagtagatggacttcatttcttgatgcctatccatagaaaaagatttagaaggacctgcaaattctacaatggagaatagaattaagggaaggtgaaaaggagagaacttttattttttgctttttactattctgtgatgttaatttttttaagcaagcatatctttttacaattgcaggacttatgagaaagtagttgctttcaatttttttttgttagtaaacaaaaacagttctatagaagttgagagttacatttttgttacaaatgtttgtctaaataattgttttcctaggctttcaatttgactgatgcttgtttgtggtataatttagacaaaaagatcagtggatccctggcttctcagaattctgcattttcccatattgagaaatgactgctcatcataaaagctgccactcagtgagaccttactttgtgcaggcactgggttaagcactttacattcattaccacacttaattcttatattaaccgtaagaagtaagcatcactactactactattactgttactacagtagtctcttgatatccacaggtatcactttctactgttttagttacccagagccaaccacagttcagaaacatttttttaagtggaaaattttagtaataaacaatttatgagttttaaattgcatgctgttctgagtagtatgctgaaatctcatgctgtcctgcttcattcctcttgggatgtgaatcctccctttgtccagtatatctatgctgtatacactacctgcccattagtcatcgacatcatttgctcctgacatccagccatggacattattatggctcactgatccaggatcattccaagcagatgatcctcctcctggtgtatggtcagaagatcattagtagactaaggctgtgccacaaggcctgtgtaattcacctcacttcatcttaccacataggcattttatcatctcacattatcacaagaagaaggataagtgtagtacaagaaaatattttgagagagagagactacattcacagaactttaattatagtatatcattttaattgtttttttatctcttactgtgcctaatttataaattaaactttatcataggtatgtatgtataggaaaagcatagtatatagtttggtactatatatgttttcaggaatccactggggaacatatcatccacagttaaggggaaactactgtattacagtatatacagtaatagttggtgtagggtggtggaaaaaccatctgattcatcggtagctcaattgatagcctctattcatggaattttgtacctttggggaaaacgatgtgatccttaatgtgaacttgatacccagaacccattgagtcatatttattacttattatatgtatagtgtaaaaatttgtgtctaccagcaaattagtgcaacccctaaatcttactgtagtgaatatatgaaatcagtttgaggtacctttaagtttaattttgtttcaaccattgtaatggtcagttcctttgctttgctttcaattacacatggtccccatgattcctttgctttgctttcagttacagacagtccccgacttaggatggcttaatgtttttttgactttccaatattgtgaaagcagcacagattcagtggaaactgtattttgagtacctgtacaaccattctgtttttcactttcaagacagtattcaataggttacatgagatatttgacactttatcataaaatagtctttgtgtttgattattttgcccaactgtaggctaatgtaattgtgctgagcacatttaagggtagtctaggctgagctatgatttcagtagattggacatactgtttgcattttcagcttaggatattttcaacttgttatgtatgggttgactgtgatatgatcccattgtaaatcaaggagcttctgtacagttcaaccttattttcactatcttcatttagcaatattttagattttaattatcttatccctgtcctgtagtttgttcagtgcccatgtgtatctacactcttgtttcctggcttaacattttcattgtcagataatcttttttttttttttttttttttttttttttttttttttgagacagagtcttgctcttttgcccaggctggaagttcattggtgctgtcttggctccctgcagactctacctcccaggttcaagcaattctcctgcctcagcctcccaagtagctgggactgtaggcatgcctggctaagttttgtatttttagtagagacgagatttcaccgtgttggccaggctggtctcaaactcctgacctcaggtgatccacccgcctcagccttccaaagtgctgggattacagacatgagccaccacgcctggcccagacaatcttttagaggtctaagatatcaaatcagagtgtagtaggtataaaatagctctttttggtaagtttttgatagatatatgatgcatctttataaacatgcatttggagtttaatatcatatattacctttggacattttttgtgctgctatcgagcttttgtgtttttaatagattgcagagactgtttattaaactgatatcattttttcactcccagtacatgtatgtacaccctcttacacattttaataaaggttttttttacttgtaatacacatagtttgtaatacataaacaagacgtttgttgattgtgttagttggtacttaatttgttcttgtattatcaaattttttcatttattgctgactaaagcagcagctcttaatagtttttgaatcatggactactttgaaaatgcattaatagcagtggacacttccccccagaaaaatgaataaataccagacagtttgtatgcaactttaggtgattcttggccttcccatagctctcccaagaactccagggtaaacatctttattctattatagtacaaggaaatatgactatagttcataataaccacttgtagaaagtaggtattacacatacgatatgatgccaacattttaaaaataagtgaaacagtaaagaggcattaacagaattattctaatgcaataattgctctacattagtatagtgttttccatagaccaaaagaaacattgattttaactaatgtgaaattttattgggtctacagtaacttactcatacttggttaaatccctgtatacttaaaagtgttgtgtgtgcctaggcatggaaaaataacttcctggcgatgtagctcagtttaacttttgacttgcagataatggcatccatttgaaattgttacctgtcccagaatatgcagtgtaaagttatttactaatttgccagtgatgttttatttctacagaggaacttttttccagacaaactgaagtttcatgacattgtcacttcaaagctaatttatttatagttgtattttaggacctgagtcaaaagaccctccatatgtttcctgggatataataccctgtaattatcaactgcagattcttgtgcagggttgccttttgagttattttgtgtgtttacctaattccagggcctcagtttaatacattttctttggagcaatctataaagtatatgaagggtcaggtgagaggtgggacagggacagaaatctatcagattgacagcatgcatatgctacacccctgacttcaggacttacgttttactaaggaattcttgcttccttttttgcaataaatagttaaaatatttgacacaaatgattcttaatagtttgctagtaggaaaagtataagaaactagcaatcttgtagaaaggggcatttctagtttttaaaagtatactgaatgctattgcatatttataaagcaatattttattgtttatttgatatataagatatcaagaaaatgtgaagaaaatcttggcttgtggtgctacaaagaactatagtgttagtgattctcaaaggaaagtaaaactgatcgaagtgtatacagatttttacatgtatttttttttaatccaagagattcagatacccccctttctattttatacttcttccttgagaataccactttagctgaaattcacctagaaaaaaaggtcttttgactcctatgaatatgtatcaaccaagaatgaatttttcactttatgttcagtagtttacctaactaaaactttttgacagggagggagatgacttgtttccaagtataaattttcatttagtaagaaaagaatgaagtccaaaacagtcttgaaaaagaatgaagttggaggagtcactttttttttttttttgagacagggtctcgctctgtcacccaggctggagtgcaatggtacaatcatggcttactgtagcctgcaccttcttggctcaagctctcctcccacctttagcctcctgagtaactgggactacaggtacacaccaccatgcctggtgaaattttgtattctttgttatagataggttttcaccatgttgcccagactggtctcaaacttctgggctcaacaagtgatccacctaccttggcttcccaaagtgctgggattacaggcatgatccaccatgcccagccacactttctgttttcaaaacttattacacaactgcagtcatcaagacaatgtattactggtgtgaatgtagccatatagatcaattaagtagaatggagagtctagaaataaacctgtatgtttattgtcagttgagttttgaaaaggattccaagacaattcaatggggaaagaatagtcttttcagcaaatggtgcttggacaactggatatccatatgcaaaagaatgaagttggacccccacctcacaccatatacaaaaattatatggtttgtggagaaaagggaatcctttacactgtttttaggaatgtaaattagtgcaaccattatggaagactatatggaggttcctcaaaaaactgaaaataaaattacagtatgatccagcagttctacttctaggtatctatcctaaagacttgaagtcattatgtcaaagagatatctgtactccctagttctattcatgaaagccaagatatggaaacaatggaagtacctatcagcggatgaatggaaggaaaaatacggtatatatatatccactacagtagaatactacttagccttaagaaagaaggaaattctgtcatttgtgataacatgggtgaacctggaggacattatgctaagtagagtaagtcaggcatagaaagagaaatactgcatggtcttactaatatgtggattctgaaacaattgaattccagaagcagagagaagaatagtgtttaccagaaggtggagaggatgggaaatgttggccaaagggtacaaaattatagttagacaggaggagcaaatgataagtatttaatgtaatcagtatgttaactagtctgattctgttattacacagtgtacacataatatcagtttacctcaaaactgtatacagttataattcgtcagttaattaaaaacaaatgaattcagaatgaatcaaagacctaaagttagagccaaaactataaaactcttagaaggaaatagttataaatctttgtaaacttcaattagtcaatattttcatacgtgtaacacaaaagcacacattacaaaagaaaatacaagtaaattggactgtgtcaaatttaaaaacttgcactttagaagacagcgtcaagaaagttaaaagacagaattggagaaaatttttacaaattatgtctggtaagggatttgtatctacagtatataaggaattcttacaacttaataataaaaagaaagcccacttgaaagatggacaaagaatctgcatagacacttctctaaagaagatacacaaatggccagtaagcatacaaaaagatgctcaacatcattattcatcaaggaaatgaaagtcagtaccataatgaatattattatcacgctcaccataatgactaaagtaaaaagacagtaactaatgttggtgaggatatggggaaactggaaccttcatgcattgctgatgtggttgtaaaataatgcaaactttgaacaagtttggcagttcctcaaaatattaaacattgagttatatgacccagcaattcagtttgtaggtatatgtactagataattgaaaacttacatccacacaaaacatgtatgcaaagtttatagcaatgttaaatcgccaaaaaagggaacaattaaaatttttagcaactgatgaggatataacggccaacctcacataacccaacactccaatttccatatgcagttattttatgcagaaaagaaatgaagatgtttaggtattcaaccatttatacaatgattatattgtgttatataattttatttttaaagcctttattgaattcattgtctataggcctagccatacattcctttagtctttcaagatacataccacattaactatatgcattaatttagtgaaccgtttttactaggtgctgggcaagaacttagagggttctcgccttcaggggcttcagagactgatggatgggaggagaggaacaactgagggcaatagcgcaaacccagtattattccagatgtctgagcagagtacaaaggcagaagcatttcacttagagtagtgctgtctggaaagccttcataggagagctaaccattgagctgaatcttgaaacatcaaaatgtatttaccagatagggaggggaagggagtggataaatatttagtaaaactaggtttcatgtgtttctttatggttgtcacttaaggttctgcctggtggggttggtagaatacgagtttactgggaaagagaagactggagctgttgacagtggccagatcacattagcttgtaagcagttggaagcaactgcaggatttaagcagagcagcaacattcctaatagactttcttttacttcgctcttaaaggctgcaggtgcacctctattgctgaagtttggcgacctctggtggtgaactataaaataaacaaggttgtggaagaaatactagcatttcagagcttttgtcagttgctttttgtcacatgcttcttgggccatattatttctttgaagacagtagttatcaactcataattcctgtgttgatgtttttccgtgtttggataaatttgtaaccaggtgggactaggaacagataaaataattgatttaatagtaaggggataaacagtatccccaaaggggtggggcaggctgatcttggtgctttttgcaacaaatggaaaggtcatgagttctagtaatagataactgagaatatgttctcttcccattgttgtgatagtttttaaaattcccccctcttttgtatgaaatatacttacagaagagtgcataaaacatttccatgtggtttaacttcctttaagtgaaaaaaaggactcacttttcaggaaatccaggaataagtattaattactcaaagtatatatctttagtctaaacgttttggggaagaaaatttccatctcttaaaattcaagtgaaccctaagtcttgttttgtgtatgaaatgagaatttatcgaacatcttttttaatctataaaattatttttcaattattctgtttcaaaagttccaaatgtagaattcagccagagtaaatcaggtagaaatatactttgaacctaataaaaacttaatataaaacctaaagatatactcagaggttgaaataggattgttgctaaaatgtcttatgtttgtgatattaaagatagtcatgcattcagaatctttgctcttcatatctgttacttgcttgccttttagcctttaattatatcatccatctgtaatccagtccttattccttttagcatgctggttttcacctacacacctagtgtgcatagaatgtactttttactcatttgcctcctacattccttaagtaaaatcagctcttgactccccttccagaaccttctgaatccattcctctttccattgcagtgtaggactttcacctcacacattacctatacttactttgctatactattgtcacctgattgttgttgatttatatacaagtctctctgccgtagagcttcttgaggatagacactaaataaatgttttgaaatatgaacaacttcagagactgaaaagtttcttaaatgcctcttgattatgtctcatctttggtttcttaaaaaaatatgcatattgtatataaaatagttctgattttagggtttgacagattctgatacttttaatgctagccttataaatagtaatttaagaaggttaaacatccgtttgcatttagtaaaggcgacacaagttacataatggtccctttttttttaactttttaaatcaagttaatagaaatataatttatgtataataaaatatagccattttaaatgacagtttagtaaatttcaacaaacaaagccatataaccactaccctggtcaagatttagaacatttctatcgtcctaaaaatgtttccttttatagcctagaatgaccaaatgtctcagtttgcccagactgaggggtttgccaagatggtcccaggcaaactgggatggttggtcaccctgttcattctcctttgtggtcagtttcccatcttctgtctcaggtgatcgttgatctattttctgtcactacagatgcctattctagaatttcataaacgaaatatatttcttttgtatttggctttttttgcttaatatcatgtttgtgagatttgtcagtgttgttgtctatatcacctgtttattcctttttatgctgagttgtattctattttatgagtataccacaatgtgtttatccgttcacctgtgagtggacatttgacttgttttggagttttgattattatgagtaaagttcctgtgaatgtttgtttacaagtgtttttgcagacatgtgtttatatttctcttgaataaaaaagtaggactgaaattgctgatcatatggtaagtaagtatggttaccaaactattttccaaggcagttttactatttgacactcccagcaacaatacatgagcactccagtgctccacattgtcatcaacacatggtcttctcaataattttagatttagtcttaaaatgacttttatcattaggaaatgcccctctttatttttgtttaattttcttatcctgaagttttcattttcttatattaatataggcactctatctttcttatggttagtatttgcatggtataacttcttgcattcttttacttttaatctatgtgttttaatttaaagtgcatttcttacagacgtatagtgaggttttttaattgagtttgacaatttctccctttctaattgaagtacttagactatttgcattcagtataattatcactgtggttgagtttaagatttgcaccttggtgtttgttttcttttcatcccatctttcctttcctctgtttttccccctcttttactgccacctatggattaaaacagtagtttttattttttctattggtttttaagctatacttccttgttgcatttttagaggttggtctaggatttaaaatgtgcatcaatatattacaatctgtcttcaaatagtaatgtacaatgtcatatggaaaacaagaaccatgtgacagtatttccattccccttcctgttctttgtgctatagttttcatactttttaattctacatgttataatccttacaatatttgttgtttattgggggaacccacccctaatatttcaacataggttctttctattttccataagtgtcggctggctgagaaataaagcgaaagggtacaaagagaggaattttacagctctgcctccgggggtgatatcacatattggtaggaccgtgatgcccacctgagccgcaaaaccagcacataaaaaggatttcaaaaggggaggggttgcaagaacaggaagtaggtcacaagatcatatgcttcaaagggcaaaaggaagaacaaagatcacatgcttctgaggaaacaggacaaaggacaaaaggcagaacttttgataagggtctgtgttcagcagtgcacatattgtcttgataaacatcttaacagaaaacaaggtttgagagcagagaacccatctgacctccaatttaccagggaagggtttttccccaccctagtaagcctgagggtactgcaggagaccagggcgtatttcagtccttacttcaacagcataagatagacactcacagagcagctgtttatagacctccccccaggaatgcattcctttcccagagtattaatccttgctaggaaaataatttagcaatatcttccctacttgcacgtccatttataggctgtctgcaagaagaaaaatatggctctattttgcccgatgctgcaggcagtcagaccttatggttgtcttcccttgttccctgaaaatcgctgttattctgttctttttcaaggtgcactgatttcatgttattcaaacacacatgttttacaatctatttgtacagttgacacaatagtggtcctgaggtgatgtacatcctcagcttacgaagataacaagattaagagattaaagtaaagacaggcataagaaattatgagagtattatttgggaactgataaatgtccatattaaaatgagatcttcacaattcatgttcttctgccacagctccagccagtccctctgttcagagtccttgacttcctgcaacagttgttactttgttttaagcaatttcttcaagagaaattttttaatgagggggaaatgtcatacatttaactgcatatttaccattttcagtgctctttattcctttgtgtagatcagaatgcccatttggaagtctttctttcatcctgaactacttttttgtggtgaagatctgctggtgacaaactcagttagcttttatttgcctaaaaatttattttaaaggatattttcacttgacagaattggtttccagggtttatttttctttcattctttggagagatctctcttttcttctggctttcattgtttctgataagaagtcagctgttgataccctgtatatgccctgtctataatgtgtttctggcattcttgaagattttcactttatgagtggcttttaccagttgattatgagtttttatagtattatttgtatttgtcctcattcaggttcattgaacttcttgtatttgtgggataatgcatggtttttataaaatttgggtaagttttggtaatgtttcttcaaataatttttctgcatctgccctacttcccaccatcagactcaagtcacatttgtacgttttttccctccgtgcttcagctttgatagtttctattgctgtttttttaattcagtgattcagtttcttccctgtgtctaacctgttaatcctctcctgtgaagttttaatttcacatactatatttttttaactgtacaatttccatttggttcttttttatatcttctatttctctccttgttataatagctattttaaagtacttatgtgctaattctgtcatctctgtcatatctggacctctgtctgttgactgacttgatttttttctcttcttatattttcctacttctttaaaaatgttgaattttgtttgtcagccagtttcttagttgtttacacctggggggcagtttcagtgttcagaatttcatcacagctagatgcagaagtctataatagccttttaaaaaataataatacaatgcaagcctttgcatggcattctattaagtttattttacaaagcattttaaaataagttttaaattttttatactcaattttatcttgtttagccagttagatgactgtttcttcatagtattcttctgttgctaaagacctctgttattaacagtttaaaatattttttccaacttttattttagtttcaggggtgcatgtgcaagtttgttgcctggatatcttgtgtgatgctgaggtttgaggtatgaatgatcttgtcacccaggtactgagcatggcatccagtagttagttttgcagccttctttccctctctagttgtcctcagtttgtattattgccatctttatgtccataagtacccaatgtttagttcccacttataggtgagaacatgcggtatttgctttcctattcagtaatctgcttaggataatggcttccagcagcatctatgttgctgcaaaggatataattttttttatggctgcatgatagtctatggtgtatatgtaccacgttttctttgtctagtccactgttgatgagcatctaagttgattccatgtctttgttattgtgaagaatgctgtgatgagcatgcaagtggttgtatctgtttggtagaacaatttttcttttggatatatacagtaatggcattgctgggtcaagcaagttatctgagaaatctctaaactgctttctacagtggctggactaatttacattcccaccaatagcatataagtgttctctttcctctgcagcctcaccatgtctgttgtttttttactttttaattagccattgtgactgatgtgagatggtatctcattgtgattttgacttgcatttctctgatgattagtgattgtgaagcatttttttcatgtttgttggccacttgtatgtcttctttagagaagtttctgttcatgtcttctgcccgttttttaatgtggttatttgttttttgcttgttgatttaagtttcttacagattctgggtatgagacctgtcagatgtgtagtttgtgactattttctccaattctgtaagttgtctgtttattcttttgatggttggttttgctatgcagaaactctttaattagttctcaccaacttttgtttttattgcagttgcttttgagaattcagtcatagattatttctcaaggccaatgtctagaatagtgtttcctaggttttcttgtagaatttttatagtttgaggtcttacatttaaatcgtaagtccatcttgagtcactttttgtatatggtgaaagataggggtccagtttcattctttagcatgtggttagccagctatcccagcaccatttattgaatagggaatcctttccccattgtttatttttgtcgactgtaccaatatgatgctgttttgattaatgtagccttacagtatagtttgaggtcaggtaatgtgatgcctctggctttgtcctttttgcttaggattgctttggctatatgggctcttttttggttccatatgaatttgagaatagtttcttctagttctgtgaaaaatgacattggtagtttgataggaatagcattgaatctgtagaatgctttgggcagtatggccattttaacagtactgattcttccaatccatgagcatggaatgcttttccatttgtgtcatctgatttctcttagcagcattttgtagttctccctgtagagatctttcacctccttggttagaggtattcctaggtattttatatgtggctattgtaaataggattgtgttcttgattcagctctcagcttgaacattattggtgtatagaaatgctacttactttcatttacggattttgtatcctgaaactttactgaaggcatttatcagttccaggaacgttttgacaggaacctttgtctttagggctttctaggtatagaatcatatcatctgcaaagaaaatagtttgactacttctttttttatttggatgccatttgtttttttctcctgcctaattgctctggctagcacttctagtactatgttgaataggaatggtgagagtgggcatccttgtcttgttccacttctcaaggagaatgcttccagtttttgcccattcagtataatgttgatactcattttattaagttgaattaccgtgataggggtaggttttatttaaatcggtattttttttaagttgccaaaaagtgttttaactttcgaaacttgtttatagccttgtgatcttacaaaacctttatatattttatacaactcaaaaggattcaggtttcttttttatggtataatcagtgtattttaagaaaatgactttttaaaagttattttgtaaaaagtcttccttcttttctgcccttaacattggatagaccattttagggagtcagtgacacatgcatttgtatccctgtctaccactgacaaattgtaaccttgagacttctgtcagccttaggtttttcaagtgtaaaagaggataatattgtatctgcaaaattcaaatgagaaaagaaaattgatatatctagcacactgctcttacatgctatgtgcttaataaatatttgttctttgttctctcctttctctcactggcagtatgttttgaaaggaaaacttaatttcactaaactcatgtcaggtgattgtggtcggcttgctcttctcatgacctcagcaagatcagaaaggaaatcttaatggccacctgcagtgaacaccttttggactttattttttgcctggatttattgtgtcataagatacttctttgtcctttaagtgttcaccttccttggcccccatggtgtcactgtttatgggaccttgcccaactccttgtacttctatctcagccttctgtttaaatttctctcttttctgtatatttgaatgcccatctttagcactcttctttgtctgctttccctgttatgcactgtcacagccacctagcgcttataccacaggtactaccaaagcagttcttttagcctcaagctctcttctaagtaatgtatctgatgtctaccacttggtggagagctcctcctggttcttcctgaatgtctgatctcaaatattattttctcttccagatctactacttcatgcctaatatcatcaagatttttcacagctactgaaattgtttaccttctagccacattcaataaccagattctttgatgccacctcctaaaatttgtttaccactgataaggtttaaattcctttccagctctatttctagttacgacctctgaaaagatactccttctgggtctgtttttctcatgtttaaaaatgtttgtgttaggttaagggtcaacacagtagagtccaggggccaaacacaatctgctacccatttttgtaaataaactttgtttgtggttgtttttatgttgcagagttgagtagtgacagagacttcgtgtcccacaagctttaaatatttactctctggccctttccagaaaaagtctgctgacccctgaattagaaaatctctcatctagtttccattttttttaaatgtgttttttgtgaccattcatgatcacgtctagggatagtaggcatttttaaattgctccctaaagttttattttaattggtttatcattagaagtcaccaacagaaataagtagtttttttcctatattgtgaggaccttgtcgtaataaaatattcttcagtgtttcaaatttgagagctttttgaatttttagtattttttaatatgttgtaaatcctactgtcagccaccctaaggagaacctggcgttaagatttaaaaaacaataaggaaaagactagaaaaatgatagtagttgaattaaacatggaacatactgtaatgttaggatctctgtttcccatctaatagccttcgtgattcatagtcatgtgaaagtaaattgatgaataggattttctttgccattttgtgctgacagactttttttagttaattgctttttaaaaataatttatagtgaatacatcaacaacaattctatttacaggttggtagttaaagtctcttaaaagtcagtgataactacattttgaaggtaaagaatatacctagttaaaactctgaccactgattgtaagtataataaagaaaccttttttaaccagtggggaacccaggtgaaataaatgcaaatcaacagtaaaagcgtataaatctttataaaggaatgagttgcagaagaaaaaaaatgctttttaaatatcatcactgttcatcaaagcagattatttcccattgtgataaagattttccacatgcgttttctggtgtatattaaaggaggattcaaggtatgtaaaaaatacttataaagttgtaaatatcaaaccttaattatatgcatgctgatgtgtactgatatctgcaacttattttgaaatgcatcaaaaaatagttgggttgatgtatggatagagggttggatatgtgattaaccaaatagagtaaaatgttagttggagaatatggatactggatatagtgggttggtgttcactgtaaaactttcacaacttttttgtttgaaattttccttgacataatattaggtaaaatgtttagatctaagtggctgtgagacagtgagtttagggagaaggattgagagtgagtacacacacacggtgtaccttaaataaattattaaaagtttatatgtttagcatactttgtgtataagcacatgcttctcaactgttttattgtatatttcacagatttgcttccattaggaatattcttaggttataagtgaaaaaaaaaaaaaagaattataaaactttcatttcaaggaacgtcctgacttacgttatacattgtaactgtattagtcattttcacgctgctgataaagacataccctagactgggtaatttaataaggaacgggtttaattaacttacagttccacatgactggggaggcctcacaatcatggcagaaggcaaggaagagcaaagtcatatcttacatggatggtggcaggcaagagacgggagcttgtcttgtgcaggcagactcccctttataaaacccatcagatcttgtgagtcttactcactatcatgagaacaacatggggcaaactgcccccatgattcaatttatctcccactgggttcctcccacaacataagggaaatatgggagctacaattcaaaatgagatttgggtgggaacatagtcaaaccatatcagtaactcttgaattatcccccataacctctataggaaagttagctgaatgcttgagaagtccatgtgatttctgttcacacagtaaacaggtgcatttactaatggacatcatataattctcatttcttttggagagttagtactgtgtcttatgttagcaaagtactgaatatatagaggatgactgtacaacaaatactgattcaagagtgggcatttctgaagtgtcattttggttatttctaaatatatcataatgaaaaaatatgtacaaatatattctaagtacaatagtaaatattcatgtaactacaacttatgttaagaattagaggtagaagaattacttttgccccataccagtcacagcccccttttgcacatcctctttgttaaactagataatctgtacttgattttaatgatgagtattcttatgttttttatttagttttacacagttttactatgtaaactatgtgttgtctgattttgaactttatataaggcagtcatgctgtgtgcattcattgtttgtgagattcatccataaaggtatgtgtagctctggtttagtcctcttcattgctagttagtatattattgtatgactatgccacaatttatttgttaattctactggtggatttttgcttttattggcagtattttattattatgaacaatgttgctttagaggtataagaatttctctgttagggtataatagcttgaaatggaaatcagtaggttgtagggtcactgaaggtatacatttataaacactcgtttattcatgtcattgccaccgttgtttgttttcagctctcaaaagaatccagtagcgttgcttgtgacagaattattgataagcttattagtactgctccctcatttttcactcctcaccctctcaccaggtacatgtatacacatacacagacacatgcacatatcaccagaacaatgttagaaataggggttagaataagtgttaataatttagaatatttttacagtcacctttttattttctttccaattacattaggagtttgctcagaaattaccttatacacagttaaaggtcagtttatttttaactagattcccttttgatttatgtcaataatgattctgtagttcagaatattcttccatctatcttacccaaactttatgtattctaatagttaaataatttctgaaagtttttattacaggtgtaattggcatacaagaaactacacatagggaccacatcaagataaaaagcttctgcacagcaaaggaaacagttaacagactgaagagacaatgcacaaaatgggagaaaatatttgacaagagcttaataaccagaatatataagaagctccaacaactttataggaaaaatatctaataatctgattttgaaatggacaaaagatctgaatagacattgctcaaaaggatacatacagatggcaaacaggtatatgagaggtgctcaacatcattgatcatcagagaaatgcaaatcgaaactacaatgagatatctcaccccagataaaatggcttttatctctaaatgacaggcagtatcaaatgccgacaaggatgtggagaaaacagaatccttgtatgttgatagtacagcttccatggagaacagtatggaggctcctgaaaaaactaaaaatagagctgccataccatctagcagttgtactgctaggtatatatccaaaagaaaggaaatcagtatattgaacagataactgcactcctatgtttattgcaacactcttcacaatagccaaggtttggaagcaacctaagtgttcatcagcatggacacttcatgaatagatacagaaaaatagattttaaaatatatatatatatatacacacacacacacacactcaaaaagaatgagatcctattatatgcaacaacatagatggcaccggaagtcattgtgttaagccaggcacagaaagacaaacttcacatgttctcagttatttatgagagctaaaaattaaaacaaatgaactcatgaagatagagagtagaatgatggttagcagaagctgggaagggcggttgagggggaaatagggatggttaatgggtacaaaacaatggaaagaataaaatctagtatttcatagcacaacagagtgactatacacaataacaatttaattaaatattgaaaaatacctaaaagagtataattgggttgtttataaaacaaaggataggccgggcatgatggctcacacctgtaatcccagcactttgggaggccgaggtgggtggatcacaaggtcaggagatcgagactatcctgactgacactgtgaaacctcgtctctactgaaaaatacaaaaaataagccagatgtggtggcaggcgcctgtagtcccagctactcgggaggctaaggcaggggaatggcgtgagcccaggaggtggagcttgcagtgagccgagatgacgccactgcactccagcctgggcaacagtgcaagactccgtctctaaaataaataaataaataaaaataaacaaaggacaaatgcttgaggtgatggataccacatttaccctgctgtgattattatacattgtatgcgtacatcagagtgtctcatatattccatagatatattcacctatgtatccacagaaataaatattttttaaaactgcacacatttaaagggttcaatttgataagtttcgccgtatgcttacacccatgaaactgagataatgaacattcataatcccagtagcttcctagtgtccctttgtagtcctgcttctcaaaactgtagatattctgtcactataggcagaaaatttgctagaattgcccatgaatgtggttatactttaggtactctttttggtctggcttctctcactcagctttattatttttagattcatccatgttgttctttttaaattactgagtaatattttactgtgtggctgtgtaccatttatttacttgtcaatgccattttggtttgtttctactgtttagcagttgcaaaaaaaatgctatgcatatttgtgtacaagtctttgtatgaacatatgtgttcatttctcttgggtaagtacctaggagtgggcatgttgggttgtatgatacatatgtgtttagcttttaagaaacttccaaactgttttccaaggtgctgtataccattccacatttccaccatcaatggtgagagcttcagttgctctacatccttgccaagatttgttatacatagtctttaattttagccttcttattgggtggatagtggtatcttgtcttaattagcatttccctaatgattaatgatgccaaacatcttttcttgtgcttatttgccatctctatgtcatccttggtgaaatgtctgtacatatcttttgctgatttgtattgacttgtcttattttgaattataagttttttatatattcaaaatacaagccctttgcaaaatgtattttgcaaagggcttgtattttccctcagttcgtggctaaccttttcattttcttaagtgtcttttaaagaacaaacttttaaaaatttgaataaagttctgaaagttttagcagagtctagagagttagaaccaataacaaaaacataacaaattctcactttgccctgaatggttacagaattatgcctgattgttcactggttgccaccacaaatctagtacttaacattcctttcttctacttctgtgcaattattcttgaactgtaactggtttaatattttatttcaacaaatttgacttatacaaggtcttatagttataaagatgagtaatatgtggtgtttctcttcaaagtcctcaatttttagcatttaatgtttcttcttgtcacccatcttgtacagccaggtctatgtactttcctttgttcagtccctagtatagctctagaaacaatgaagtgctcaatacatttttgttgtgtactgtagttatacttttttgacatacaaatatgtaagtttatggtagcaggaaatctcttgttctttgtatcctccaaaagtcctaacatagttccttatacacaagggacactaagtattcaacgactgaatgaattattgggggtttataataaagtttgcctgatatattgataatacaattggccttccatatctacaggttccgcatcggcaaaatcaaccaactgcagatcaaaaatattcagaaaataacaatgtaaaaatacattaataaagaataatgtacaacttaaaaacaatacaatgtaacaactatttaagtattatcataacctaagtattataataacctaaagatgatttaaagtataggaggatgtaagtaggttatatgcaactattatgccattttatataagggactcaagcatgtctggattttggtatcctcagggggctcctgaaacaatctggataccaagggacagctgtataatctttggctttactgaactaagtgaagaaaaagtactctcagatgtgattattgcaatagatagtttttctagagaaaacaaatatacctgatttttaattgaatatttatgagtatggtaatcttttttatgacccaaatttaacattattgttatcatagaagtctgtctatggtaatacagcatgaaatctgtagtcagctacagataaaaggctttcacaaagtttgtttgccttagtctgttttgtgctgctgtaacagaataccaaagactgggtaatatataaacaatagaaatttacttggttcactgttccagagactggaaagtccaatgtcaaagggcccacatctggtgatggccttcattgctgtatctcatgttggaaggcagaaagtcaagacagggcaagagtgagagggagccaaacttacattgctaaccaacccgctcttgaaataacaagcctgcttccactttaatgatgtgactccattcacaagggcagagacattatctaattaccatttaaacatcccacctctcaacactgttgaattgggtattaaatttccaacacatgagccttgggggacatattcaaatcatagcactgctgtatttaatgagttaagtattttatttaagttgagaattccttttttaagtgaatccaatgccttaaaacatataaatttctaaatatataggaaaagatggcaataacttgctttctttatctaggtcctgggaactccaacaagggagcaaatcagagaaatgaacccaaactacacagaatttaaattccctcaaattaaggcacatccctggactaaggtgagtcagattttttttaaagtatattaatcaatagttaactaaaacaggtttctcgttcttaaactaaactattttgagatcagatagttgcatgaatacaagcagttctgcatgtaaagatagttgtatagatgtacttgagtgtttcattgactttatatagtttcagtctcattgatttccagtagacagtttctagcctggttttttgtttacaaggtaaggacagtgtacttatatcattaaagtacagaattaatgatttaggagtaggatcttatataaaattttggcaacctaaaattcagaagtttatttacatagaggtgtatagtttaatatcatatagcataccatacatttcaaacattattcttttaaactgttaaaacacataccttattatagatggcattttgtgtttttcctctcttgtttaccttcctactggcattttggaaacatgattagaaagcaaatgtaatcttgctgggagtatacattaaaaacaattgataggttaactggatgtcactagcctttggaaaaacctaaccttaacattagatggaaccagttctaaagagcataattgctaatgtaccggggaacttcttttttttcctttggtatttaattggaatgattttaagagagattttattaaaaagtgttttcacctcagtttgatttgtgagattatgaagagaaaaaatataaaatttctcagtagggtttataagtagagtgaatctctaactaactctgaccaaagattcaaagtgacttacccaagattacatggatggcttgtgacaaagccgggattaaacttctctgtgtgtgtgtgtgtgtgtgcgcttgtgtgtgtgtgtgtgtatgtgtcatgagttacaaatgatcaactttataatatgtattttaaggagagactttctgtattttaaaatgtacatataacaattcattttatatactgttcatttagttggttatagatcttttataattagaggtgaagtaattcagggctataggtgaaataatttacactctgtagaatcaaagtatgtttctctctctctctctctcaattgtgtatattatgattccagttactttttctttaagttctcataatctcattatctatcttcagaaaattctcattactaattatttatttcctatttagaatcaaagacctcaattgtattttagtgccagaattataggttgtagcttttactacaacctggccaacagaccacgatcttgcctcccctttttaaaagtttatggtaagcactaaatagtctgagattcaaaagtgttctttgacctttgtattcaaagcttattttaaatctgggtcagaagatatttagggattctcacctgactctaaacccaggaaatctcaggtggcctacttggatttaggggctgcattacagtttgagtccattatagttactgcaagttaaattgtttataataagtgatttgtagtatactatgacttcagccgtgttaagtgaaaaacatcaaagagaattctgtgtattaaataaatacagagaaatattccaaaatgccaacagtagtttggttaagaagaaagtgcacgattttattttctttggtctaccttttcaaactttcatattttctttaataatgatgttatttttatgaggaaaaggaaaaattctttttggtataatctaagtattcatcacatattaccctccttatagagtttctgacaaatataatgctgaaattgagtctatgagatgctatttaacagtccccatcctccattattattattattattatttatcaagattgccactagtcctcctttatctaaggtttcagttacacttggtcaacctctgtctgaaataggtgatatagtacaataagatattttgagagagatactacattcacattattttatgatagatattataattattctattttattattagttattgttaacatcttactgtgcctaatttataaagtaagcttttattactggtacgtatgtatagagaaaaacagtgtatgtagggtttagtagtacttgcagtctcggcatccacatgagggtcttggggacatatcccctgtagataaaagggagggggcactgtatttagtgtgtgtcaaattctgcattttccccctgaattatctctctctaatgcaagtattagctagagtagaatgtgagaaatagttgattataattaaaatgcagccaacgaaagagctgtgctaaatatgtatgctttaaatctttgccctcttgaattcttgatgtttccatatcttatactaatgcttttcaaacctgaatcgtctatgtaaagcccgtttatttagatttccattcctgtaccttgtatagaaaaatgactcagttctcccatcttttttgtctattaaaaggactctgaacctttcattcatctggcgtcttttgacataatctggttttcacttcatacacatgcgttatgtaataagtgcacttatgctggttcctcacttgtgcacatgagagtgggtgttactgggattgtaaacaaaaaagtaaattcagatgcagaaattttattatttttctctgtcatctagatgattgagaatatgcttgtgttgatttttaaaaaataggttatcataagaattaaaatacaaaacttaaaattcctagagggaactcggactcctttccctaccattgtgatagtggacagcaacttgagaaatgctcttagggtaagcagccatttaagtcatttaaagaccatatagaatgtcccccaaagagaagaccattttgcccttcgagggcaggtaaacaggagtctggaaacaagaaccacttaacctttattgctgtcttctgttagtcccatctcctgaagctgtggacatatgaaccctggtttcctgtgctgcaatgttgtgcagctatgtccccaagattgggacttgctgttcttaaaaaaaaaaaaaaaaaaaaaggagacagaaatagagatcaaaagagaaaatgtcttttgtgaaaacattgaggtaaggcgatacagatgtgtagaagaaatagcagaaaaataacactgagatgatcccagtgtgatgtatggcagaaatcttgacaattaaaaactccagtaagttgccctgggctattacataatagcaatagccagtgcaacataattctttaataaagcacttgtggcttaagtaggaaaggaaataggtgctaatattttgaaacaaggattattattggaggtgagggaatgaagacctatgccttggtgtacactgtacactacaaagaagaaaaacacacggaaagaaaaggaagtgatgcaaaagtagattgagaattaagtagagacagagattggttggaagaagagaagaaatttaaattctgcatttagtatgtggaggtgtggttaaatgatgggctattatatacagagtgagaatctagtttaaacactgctcctaatgtttatgcctcagctttttttattttgtaagatggcgaatatctgctgtgtcttttctcaggattattttgaaaatacagccataatatacatataaaggattactttagttttgaataaatgtgaaggatgtagcactccaatgtagttttctgatttgtcttctctgtctccactgccctgaccttagtttaggtcaccatcatatcacagaattattaaaaacaacctcctacctcctgatttccatccttcggtttcacatcactttaatccatcctcttcatttctgtcagagttggctttttttaaaaacatgtgtgatagtgtcactcctatttaaaattcttctctgattcctcataacctttaggagaatttagtgttatatacatatactgacaagagtgatcctatgtgccaatttatgcttgtccagtgtaattaataattgtttgcctcttcactctcaggaaggtcccagtttgggtggcagattatttagtcactctgttcttgatcttttctgcctttcttttccagaaaaatagagtatttagtatttgtcctattcctaaccttccttgaggtatctagttattgaacccagtctctttcccaagttttacagcttcctgtatccttaaatgcatgttgttaggcaatgaatttaaaagtttagtgtctacttagggttgattagggattttttaataaagttttatcatagtaggtgtacaaggtgccttcccacccactttcgagtgcgtgatccttctacccttttgtttaaatttctttgtgacaagcatttctcctctatcctagtaataaataatcctgtgtggtcagttaggtaacacagatgtctgttttattctttcagagtaatgaaagaataaagtaacaactggttagtagaaggaagtagattgcaatcccaaggcccctgatctcgtaacagttacattactgctatttaatatgttggctacatattggagtgttgtccagtttgtagatcactttgaagggaccatgcagccacactggattttctggtttagtcagattgtctcctaattgttccccagagaagccgcattcatttctgcctcttgctagtgtctcccttccctctctctcctccccttccactgtcttagaatgttctttttttcttctctgcttaccaagtcttaacctttcttaagatctcaaatctcacttctcccatgaaatactttctcattatctaagttctttatgattatcctaccacataactcctatagtacctaccaaattataccatatataatagcaattcctaatttcttttttataataatattaataccaattacttcaaaatatttgtcgccaagttgttggcatatatggtagtttaatacttaagtgtctgtagcgtttgtatgaccgtaggtcatttggtaagtctcccagaaagcgttattcacaaaaattagtccttgcatacctgatttcctaaaacactgtcaacatgcttcatagtgaatcaatactagtatttctaactggctaacagagtaagcagaaaattgaattctcgggtcatttcagttttcaaaggaattattttagactgaaaaagttacttattctctatgcttatagccaacccagaaagccccactatacttatttctttttaagactttgtccataatgttacattttttcccctgaaccattcaatagatttttcagaacttggtaaacctacctgttttaaccgttgttcagtatattattaaaatgccttcagagagacctagagggcacaaaacagaaattgctgccaaagttttcttgcacatccattctatctttcttttctggtctctctgcattactcatttcattcacatgtgttccagaaagcataaaaccatgttggggatttctgttgactcctaaggttgctacttgtctatttggttctattgcttatggtaaatcaatttttatattatttttcaaccccctctgccctgagcattctacctagaccattctcacttgtctcacaaatacatatagtatgttctctactgaaatttctacccacatccttattgctagaatagtcacttcatctccctttctaataccattttcttatgttagacctcacttttttatttctactggctatatattcttatttctttgctggaaatccacattaaaatccagcttttagggtggctaatccacatgtgaaaggaataatgtgaaaaaggaagaatactcagtaagacataattttcagattgcttgtgggaggcaaaggatgaggttggggtggatttgaaaagaaggcaaaattctatttttaatttatcatttgttctttaaatcttgtgtcttctatgtaaccagtgctgtgctgggtaccataaagcatgcaaaagaagtaaaatatatagtctttgtccttgaaaagctgacagttgaaaagctcagttgaagcaagtattgaataatgtgagataccatataaccatatacttgatgctgtgctgtaagtgttcagaggtgttccacatggctgtaggtgttataaggcagaccagtgaggatggtagagggaaaaaggaactccccttaaagataatagatgaggtgggatgttgaagggaggtttaagatttgcttaggtgtagaaaaggttaggaattgttatagcctgggtgaatatctctcaaggtggagagagatgaatggaaagaaaatatttctgtattcttaggagggccagcctgactgtaataactgttttgtgaacattgaaagattaaattggataagcagataagcaaatcacactcctgtgtaggcatgtagtattatttcatcagtgcatgatgtgagggagggaaatttatgttacatagttaaatgctgatatctacatgtatacagccagtcatttaacatcgttagtaggtgcttagaaactgcaactttaagtgaaatgatgtacaataggttctcaaataatgttgcttcattcaacgttgacgagggaaaacatttggttttattacacctttcactaaaagtcacagttttcaagaacctatcaatgacattaaatgaagacttactgtgtaacttttcttacctgtagtagaacttgggaaaactaaataaggcttttaatcagtacagctgaaattcactggatgttagatctgtcatggctaaggaaaggattctttgtgtttcttatgctcagcgttctttacctgagctggtatcttaacgaaaaggttagaaaaatacgcagtaggcctgagccgaattcagttttgtgtatcctaccctgttagatgctgatttcatagatagcaattttacttgggaggagggctctgaaagttgttttcagtagcctctggtaatcatttttgatagtacttaaagtgaattggattagcttgtatgtccgtgcatcattagatcaatgtagcaaagcatgtgaaagactgccagagaatgtatgttttttgttttttggggggggttttttgagatggagtctcactctgttgcccaggctgaagtgcagtggcacaacctcggctcactgcagcctccgcctccgaggttcaagtgattctcctgcctcagcctcccaagtaaatgagattacaggcacccaccaccacgcctggctaatttttgtatttttagtagagatagggagaatattttaaaaaatagtatggactaatttattaagtaattattgaattctgtgcgccatatgagcacttaagtagacttaattttttctcttagtgaacataacataattacctattctacagtccatggcattgtctcacttttaatcctgtgtttaggtttacaaattgcatataatttcagatgattaatagattacttgagagtcaatattggggttgctctttaggagtattcatggtttattagtttttaaaactggatgcttatattttgtatatgaccaggatatagggtgagtgttgtacatttatcataataaaaactagtgaggaatagctatttggaacaggcatggctcttgttctgtgttctgttagattaattatcactgccaacagccatttaaaatggacatttttacattgctctgattggctgcataatacaacagagtagctaagagctgacgctgtgagatgcatcttaaccataggttttggtatggtgtatgtgattgcttaaaaatggcctttttataaagtgcttgagattcagtcacaacacttagctccaggttgaaattggaaggccaaagtctattctaggacatgtagggcagaaattgcctctgccattttttagttacccaaatgcaaatttattttgaataattcttcatttaaggacttctttgcatttgttcaatactgcggaaactttcttttttaaaaaatgaattttttctgttagtttcttttatggactagtatttgtgatgagagttgatatttgttttaatttaagaaaatgagttgctgcataggtgaggtagtatttgaatcactttaaaagttcatgtcagtgttttggttcttttcaatatttcctttctcttttctttcttttttcctttctctttttcttttcttcttcttcttcttcttcttttttttttttcctttgttttattttgttctgttttattgatttacttttggttttgtttttaaaggggtgttttgggatctctgtggccttgctgcatacttcgctggccatatttagtctgcgtactaattgttagttggcccagtaagtcttattttgtgctctcagttctttcagtctggttttctatttttgtccacctggttgtgttttagttcatgagagaatttattctgatgggccagattttaatctgtgtactaaattttagtctgcagactaaaagtaatccgcggattatttatttttgaaaaatatttaattcccccactggaaactatcctaaaagaatgttaaattctcttagaatagccaggggagttcacagatactggtgagttctgccattttttgttctcaatacctagacataatagaccctgctacctcccttgcatatttggctccgttgtgcctaggtgttggtatacattactatgcctgtcacctgtaactgtgactgtcccttagttgtattgttaattgtacatattttgtttagcttttggtgggtgaattgggcatatttgcagatggaactgtgtttaatttgtagtggtcaaagatgtagggtttattttttcagagagtttttccaaagaggaaaaaatgttctctatttttcctaagtaatgggtgcaagggtataagcgggcaaagcccacaatagaaaaagtaagttaatacccgcactcctgaggtgatatgtcaatttcctgatgagtcctaagataatgagaatgtcagcaaagaaacatcttttagcagagaagtcaatccaaaatggagaataatccgcggtggcctgatccttcttagctcacacaaattaaaagtatctggcttgaaatctatagcattataacttaaatatatttactactttcctctcatcactaataacttagcaaaaaaaaaatgtttatactgtgtaactggaacacattaatagagaaaaaagtagcatatttggaacttgaaactttaaaagcaagctaatatgccccctcccagccatgtctgtggatgatgaatccaggtcgtagaagaccactttactttgggaactttacttctagatttcattttgattttaactttttttggttttgtatttttttaataaacgcactggcattggaacataataaactaaaattaaaatgtttctttactgtgcctcaccattgcacaatcaaaaaaattttttttgcatacactgtggtgaaataatttttaaaacttggacttgctactgtgaagactgatgtttaaagtttataactgtataaacattttctatgtcccccccacaccatggatttcttataacattggatatatttttccttgctggactattctcttttggattgacttcccctgtttggattatttcactgcattatcatctttaggattcgtcaggaacaggacatttcacctcaggagtgcgggtatgtacttaattttttttttcccaaaatttcagggcaggtctataaaacttgggggaaatcttttttgagaggctaaacaattattcattcttgaaatgtaatagtaaacgatgtaagtagctgtgatttctgtttttattcactgtatggcataggtttcgtttatagtatatttagattgtcagtctcttgggtgattcattgacatctaggctgaagtttaggaattgtgggattttaagattattatttctattacaagaataaatattgatgaagatccatgaaaccaaaggtctgagtgttaagcaatttcattgagtaaggaaagaagtgacagcggaagcttctttaattaaaagacaaatttcagttcttggtggtttccttttctttagaagcaaaaataattcagatgagctagtttctagtttgccctgtaatttttagaagttacatgctaactcaccctgtattatggtcagaaatctgaactgtgggagatactgggttttgaccctacatagttttccacttaacctttattcacagagtactgaaccaaggcttttctcatcaagaatctctcaagggtttaaaataacagtgtatacattttgtaaaggcaggttaaatcttgattttaaagtaggctcttggcatgtattattttctttattgtttttaactcttgaatttcgtgagttacgattctctgacaaatatacgctaataaatgtcttagtaccaatatggatgatcacttgtagccagtaaaacaccaaaagagatgggtgacttaaaaaaatagcagaaacaagcttgtaatacaggtttattaacagctttaacacaaaatctttgaaaatataacatgaaatttttttatttaaaataactcagtgcccagccatcctacatttgaatgttagcaggagatatttatttctacttttggtgctacttttaattccacttatgtgctgccatattggtgcaaaaacattttggattagctggcaaaataaattcttatactatcaaacagaagcaaacttgccttcagggataaaatatgccaatggtgtttaatatttttacaaaaattttctgggttttcccactgattattttctttttacattctgtatatgattatagaccttgggagcaagagaggggaccaataacagtagaagagctgaacctttcaaatttgacagtaactctaaggtttccttgactgaggcaagtcagagtattcagaagaatagatgaggcgggttttgaccttacaaaaaggtttctttttaacataaccaagaaattgactgaggcctttctttatgttctgaaataatttcctaagagcctgctttacctaatttctcaattttcatggaaaatgtctttttcaataataaactaaaaacaaatacaatcctcttttcactgtagacagtactcataaatagtctctggaaagtctaatgagctctgtagttgtaactagttctaaccatcagcataagtgaacaaccagatgttatatgagccattcttactaggaaaccttagcctcccaggctgctccatgccctgtcacaatctgcatggacttttctcacttgtgggtctgtttgcctccatttgtaagtgtctacttctctgtccacctccggttgtatgttcttcctgtcgagggatatatgtttcatttttctttagttccaaaggcttctcgtctgtttatttctgttccttacctttttatttttattctgtaggtggccataatttagaatgaagcatatttttatagtttttgatgattagttttatttaagacacaaattagtagaaagctatctattcctttaagtagatcaatttaattgaatttttcttcaatattgccttcagctcactttttctgtgtcttaatcattcttaatggttaatacattttttttctccttgattaaaaccctggaatattcattcaagtgggggaaatctggccatattcatggtaacacctacttgagaaaaaaaaaataggacatttaatcaaattcaaggtattcaagaatttcttcaaataatggtaggctctgtttattggaaataataccaaatcagtagcatttatagacctagagtaaatagctcttctttcttttctttttgattgccaaatttttgaacagtactgcccatcattaacaattgttctgctaaaaaacaatgcaaaagaggcaatcttttatttactgccatagcagtgaaaactttaaaatttaagaaataattttctagttgtacttgcctccagaactcagcctttcccgtgtgcctatcatattttgtatgcatgtctgattgttgttactttatgattagcatatatagatttttctccgagcatttctcatataatctttaattagcaattcacccctgtgaatcatatgcatttaactttttccattctagaaggtcctttcccaaatgcaaccatgtttctgtgcatggtggtaattaagtcattgctcacagggtatttacttagtttcttaaaacattaattattctttccctttttttgtactgcaggtcttccgaccccgaactccaccagaggcaattgcactgtgtagccgtctgctggagtatacgccaactgcccgactaacaccactggaagcttgtgcacattcattttttgatgaattacgggacccaaatgtcaaactaccaaatgggcgagacacacctgcactcttcaacttcaccactcaaggtaaatccaaacactttgctcttcaccagttctaggaaagctacacactgggtgtgaaatgacattctattaattaaaatctgtgggagacaaaaatggacatattaagtacttaggtaggcgaaaagagcatcctttctaacttaatggtcactacttatatgattttgaagaaaagagtagcacataaaagttttccaataggcatagcttctttaatttttagcagaatataatgttggcacaggagaagttacagagagttcagtgagtgaagtttatcactaattggactaatgtacaatttaacctttaggtttggatctgaaacttaaaatagtagcatttcttgcttccctagagtttgtatcaagtttttttaaacctggaatgaattggctatatttgtataaattcagttgtcttccaaacaggaggaaaactggagccctataaaccctttctaagaacttaaacaaacaatagagacaaggaaatttccatcccctctgagatttggcaccatcgctgctgcagagaaaatactgaaaggaaaactaactttgtgcattgtggtttctggaagaccttgggatagtcactatttcttcactatttctgtgttcagttttcttttctccttgattaagacctaagtgattcattcattcagtcacactacctctgatgatgtgactttcttcttacactgagcataaaaaatgtacaattcattaccaaaaaaaacacagttgatgtattgattagtaagcatactcaggctagaaaacagaaaagggagatgctgagctttctgtgaaagaaagaaatctatttcctttattcatatatatcatatctttcttttttaaaaaaaaaaagaagactcttttattttggtattttaaaatatgtttgcccagcacattagatataaatatgatgtgggtcttgaacatttatgtttttgagggtttggagaatgcatttatatttggatgtaatgtgtatagatagagtgtgtggtctctgtggttatcagagtgtttatgtgattctgagtatcagtgaaaaactggaccctgtaaacacagtcatgtattccttagtgatgcagatatgttctgagaaatgtgtcattcagcaattttcgtccttgggcagacgtcacagagtgtgcttatgcctacttattattgaaagtgctgtcattttgagatatggcccctttttaaaaagtgttaaaatgctctgtcttagcacccattctgaaactgagctgtaatcacaaagtagtactttctcacggtctttgtaaatcactattgttactgtttttgaacagtgtttctatgtaagatgtccagggaagagaggttttttttgttgttgttattgtttttgttttttggttttttttgtttgttttgttttgagacggagtctcactctgtcactcaggctggagtgcagtggcatgatcttgcctcactgcaacctccacctcccagattcaaacaattcttgtgcctcagcctccttagtagctgggattacaggcacctgccaccatgcctggctaatttttgtattttcagtagagacggggtttcaccatgttggccagactggttttaaactcctgacctcaggtgatctgcctgccttggcctcccagagtgctaggattacaggtgtgagccaccatgcctagccttgatgccattgtatttgatatgatactctgtattctaattttggagcagtgtttccaaatggtgatcttgttttctgaggcagctgtaactgtgtacagatgcaactttaaagcacatgctagttagtagtaattaatggatgaccagaataaaactgggtaatccaaggggttgaagaaggagaatcaatcttccagttggttgtatagctaaaggaaatctagagatagaaacattgtggggggtctggttgaagggtgagggatattagtgaggttcttctaaaggcagcataaagccctcctccatcctcataacaaattgtcagtgacatctgcagcactgcttcccccaaataaaataaagatctacatatagtaggtgctcaatgaatgtatgagtgccatgtaccactttaaataaacataatattcattaattcatacaaccagtatttttggggcatttctaatgttccctctggttgtcattactattgttttaatttctaaagtaaacctgctatatatacggaactataaagattaaacacttgagtaaaatatagtgttttattaaggtaaagcttacaataaagctaactgcaatttgatgtttgttactgtaccatggagtaattagccataaacagtaattagcattactttcatataatcacaatatttccatattcagatagaggaaggagagagatgaacagatatgagatggacaactttgagatctttctgattgcctaaatccataactcaggagaacatcagacctctctcatttttccagcactgaagcttcagtgttccaggaccccatgactgacaatattatctgctctcagatgttggaaattggaataaacctttggcacacccccttctttccatttcttcctgtcattagaatttcaaattcagccatagctgaatcagaccttaggaagcagatagaatcaggaaagcccagtaaggatcagtattttcttattaactaatttgttgcctattccaaggctggaatatattaggaaatcaattgttttgtatgtttaaaggtgagtcttccccaaactctatcacacacatccccaatctcagttttttacctaatttgtatgaaattttaccaattgaagttatttagtaaatattgtcctcctaagagtatagggtaggatggaggtggtaaagatattatccgtttactttagtatgagctaatgtaaacattctattcctctaccacttggcaggattatgtgagagaatggtagctttgtggggagataagtaagagtggcagcatgttggctaggccagaagaagcagtgatttaataactctggggaactgttaattgagagttgaaatgggatatttggggcagccattgagcaatatgcagactcagacagactgaatattttgaggcggggagtaagagtatctggacatgaaaaaagcaggtgatgagatagaaaaggtgttccagaaagcaagtaaataaaagaacagtaaaagggagacgaaggtataaaaaacaaaggaaaataaggaaagcgttagaaaatattttttgaaagagtataagaatgtgttacaaaataggaattgatgaaaacatggaattgaaaatgagtaggcgatgggcagcaaaagcaagtgttctagaatcctagttcatcaaagatttatatttctttcatttgaaagcagtaggctacttatttataaaatctattgtaattaattatgataactagcagattccatatttgtaacaatggtttttaaacttattttcccattataaaatagcgatagacataaatagggtcagctcatctatttatctgcccatgtcctgcctttttcttctaagttgccttatcctcagacacatctgaagtgaatatagtatttcaactacctgagattaattaaagtatagacatgcattgttttattgggcttcacttcaatgcatttcacaggtaatgctttttttttttttaaacaaacaaaaggttcgtgtcaactctgtgttgattgagcctgtttttccaataacctatgcttattttgtgtgtctgtgccacatttggtaattcttgcaatatttagagctttttcattgttattacatccattatggtgatctgtgatcgtaatttttttgatgttactattgtgattgttttggaagtttgtattgaacttaattgatcaatgtgtgtgtttcaactgctccacccatcagccaatccccatctctctccctctccttggatctccctattccctgaagcacaacaatattgaaattaggctatttaataaccctacaagggcctccaagtgttcaagtgaaaggcagagtcacacagactctcactttaaatcaaaagctagaatgattaagcttagtgaggaaagtatgtcaacagctgagatagatcaaaagccaggcccattgtgctaaacagttagccaagttgtgaatgcaaagaaaagttgtcaaaggaaattgaaagtgctactccagtgaacacacaaagaaataaatagagatcaaaacagccacaatattttcttaaggcagagcctaatcaaaagcaaggccctaatgttactcaattctgtaagggctgagagaggtgaggaagctacagaggaaaagtttgtagctagcagaggttggttcatgaggcttaaggaaggaagccatttccataccatacaagtgcaaggtgaagcagcaagtgctgatatagaagctgcagcaaattatccagaagacttctagttaagagcattgattaacatagctacactaaccaacagatattcagtggagacagaacagccttctattggaagaagatgccatcaacaatcttcctagctagagaggaaaagtcagtggcctggcttcaaagcttcaaaggataggttaactcacttgttgtgggctaatacagctggtgattttaagtgaaagccagtgcttctttaccattccaaaaatcctagggcccttaagaattatgctaaatctactctgcttgtgctctataaatggaacaaaaaagcctgcatgatagcacatctgtttacagcatggtttactgaatatttgaagcccactgttgagacctactgctcaggaaaaaaagattctttcaaaatattactacttagtgacaatgtatctagtcatccaagagctctgatggagatgtacaaggagatgaatgttgtttttatgcctactgacacagcatccattctgcagcccatggatcaaggaataatttctacttttatgtcctgttatttaagaaatgcatttcataaggctgtaactgccattagatagtgattcctttgatggatctgggaaaagtaaactgaaaaccttctggaaaggattcaccgttctagatgtcattaggaatgtttgtgatttgtgaaagaggtccaaatatcagtattaacaggattttagaagaagttaatctcaagtctcatggataactttgaggggctcaagacttcattggaggaagtcactgcagatgtggtggaaatagtaagagaattagcattaaaagtgaagcctgaaaagtgactgatttgctgcagtctttatgataaaacatgaacgaatgaggagttactccatatggatgagcaaaaaaagtggtttctttagaaggaatctccttctggtgaagctgctatgttgaaatgaccacaaaggatttagaatattccttaatcttagttgaaagcggtgatagggtttgagagggttgactccaattttgaaagaagttctaccagggtaaaatgctatcagccttaaatgctacagagaaatcttttgtgaaaggaagagtcagtcaatatgacaaacttcatggttgttttgttttgagaaattgccacagccaccctcaccttcagcaaccaacatcctggtcagtcagcagccattgacatcaaggtataagaccctccacccacaaaagatgacttgcagaaggctcaggtgatctttaggattttttagcttaaagtatttttaaattaaggtatatatgtgtgtttttttttttttttagatgtaatgcttattgcccacttaatagactataatgtagggtaaactcatcacttatatgcagtggaaaaccaaaacatttgcatgactcacttaattgtagtggtctaaaaccgaacctgtagtatctccgaggtattcctatatcttccaaggttattctcaaattactatgaactctgaggtgagtattaatggtttttagacttactatttacaacagccatgataaatttacttggaataggaactcttgatgtttgtaggacacatcaatagaattgatgtcagaattattcttcagtactttctaagtaatctagaagagtaaaatatctgtgtaatcagttatactcttctgggcaatgaaatgctaggtatactactggagacacaccacagggagaacttgagaaaatttatgagtggactaaaagggggcaggtaggatttagttcaggtaactacagcagtaatgacaaataatgagtgactgtattcaagattttaggctctaaattatgtattttatgtatgaatttttattgttttccctgagattatttggtccacgctgctactttggacatactctactgaggaaaatgtggcgtggtataggaacaatcaatcaaaaactagtatcttcaatgaaagttctgtgtgtagtttggacacatatacttccagaagaccagaacactggtggtatatgatatataaacaagacaataaagaaatgcaacattgcaggagcaaagagtaagtcagacctaaagcctagttccctgtaactacatagttgtagaccttggtcaacacactatccctacctgagttttcccatttaaataagtgagatcgttggatttaaggatattcaaggacatgtgcatcttcaaaattttaattataaaaatgaattgactccagaaagataaagaaaaaatgacgaagccaaacatgtagaccacgattggattaagatacaaaatcatgacataaatatgggaaaatctagactggttcccccagaatcaaaatattagcattattattattattattattattattattattattatacgttaagttctagggtacatgtgcacaacgtgtaggtttgttacatatgtatacatgtactatgttggtgtgctgcacccattaactcgtcatttacattaggtatttctcctgctatccctccccgctcccccgaccccacaacaggccccagtgtgtgatgttcctcaccctgtgtccaagtgttctcattgttcagttcccacctgagtgagaacatgtggtgtttggttttctgtccttgcaatagtttgctcagaatgatagtttccagcttcatccatgttcctacagaggacatgaactcatcctttcttatggctgcatagtattccatggtgtatatgtgccacattgtcttaatccagtctatcactgatggacattcgggttagttccaagtctttgctattgtaaatagtgccgcaataaacatacgtgtgcatgtgtctttatagcagcatgatttaaaattctttgggtatatacccagtaatgggatggctgggtcaaatggtatttctagttctagatccttgaggaattgccacactgtcttccacaatggttgaactagtttacagtcccaccaacagtgtaaaagtgttcctatttctccacatcctctccagcacctgttgtttcctgactttttaatgatcaccattctaactggtgtgagatggtatctcattgtggttttgatttacatttctctgaaggcaagtgatgatgagcattttttcatgtttctgttggctgcataaatgtcttccttataactactgggtacataacgaaatgaaggcagaaataaagatgttctttgaaaccaatgagaacaaagacacaacataccagaatctctgggacacatttaaagcagtgtgtagagggaaatttatagcactaaatgcccacaagagaaagtgggaaagatctaaaattgacactctaacatcacaattaaaagaactagagaagcaagagcaaacacattcaaaagctagcagaaggcaagaaataactaagatcagagcagaactgaaggagatacagacacaaaaaaacccgtaaaaaaatcagtgaatccaggagctggttttttgaaaagatgaaaacaaaattgatagactgttagcaagactaataaagaagaaaaaagagaataatcaaataggtgcaataaaaaaatgataaaaggggatatcaccaccgatcccacagaaatacagactaccatcatagaatactataaacacctctacgcaaataaactagaaaatctagaagaaatggataaattccagtcctcccaagactaaaccagtaagaaggtgaatccctgaatagaccaataacaggctgtgaaattgaggcaataattaatagtctaccaaccaaaaaaagtccaggaccagacagattcacagccgaattgtgccagaggtataaagaggagctggtaccattccctctgaaacgattccaatcaatagaaaaagagggaatcttccctaactcatgaggtcagcatcatcctgataccaaaacctggcagagacatgaccaaaaaggagaattttagaccaatatccctgatgaacatcgatgcaaaaatcctcaataaaatactggcaaaccgaatccagcagcacttcaaaaagcttatccaccacgatcaagtgggcttcatatgcaaggctggttcagcatacgcaaatcaataaacgtaatctatcatataaacagaaccaaagacaaaaaccacatgattatctcagtagatgcagaaaaggcctttgacaaaatttaacagctcttcgtactaaaaactctcaataaactaggtattaatgggacgtatctcaaaataataagagctatttatgacaaacccacagccaatatcataccgaatgggaaaaaactggaagcattgcctttgaaaactggcacaagacagagatgccctctctcaccagtcctattcagcatagtgttggaagttctggccagggcaatcaggcaggagaaagaaagaaagggtattcaattaggaaaagagaaagtcaaattgtccctatttgcagatgacatgattgtatattgagaaaaccccattgtctcagcccaaaatctccttaagctgataagcaatttcagcagtctcagtatacaaaaatcaatgtgcaaaaatcagaagcattcctctacaccagtaacagtcagagagccaaatcatgtgtgaattcccattcacaattgctacaaagagaataaaatacctaggagtacaacttacaagggatgtaaaggacctcttcaaggagaactgcaaaccactgctcagtgaaataaaagaggacacaaacaaatggaagaacataccatgctcatggataggaagaatcaatattgtgaaaatggccatactgcccaaggtaatttataggttcagtgccatccccatcaagctaccaatgactttcttcacagaattggaaaaaactactgtaaagttcatatggaaccaaaaagcaccctgcattgcgaagacaatcctaagccaaaagaacaaagttggaggcatcacgctacctgacttcaaactatactacaaggctacagtaaccaaaacagcatggtactggtaccaaaacagagatatagaccaatggaacagaacagagccctcagaaataataccacctctctacagccatctgatctttgacaaacctgataaaaacaagaaatggggaaaggattccctatttaataaatggtgctgggaaaactggatagccataagtagaaagctgaaactggatcccttccttacgccttatacaaaaattaattcaagatggattaaagacttaaatgttagacctaaaactataaaaaccctagaagaaaacctaggcaataccattcaggacgtaggcatgggcaaagacttcatgactaaaacaccaaaagcagtggcaacaaaagccaaaattgacaaatggtatctaattaaactaaagagcttctgcacagcagaagaaactatcatcagagtgaacaggcaacatacagaataggagaaaatgtttacaatctacctttctgacaaagagctaatatccagaatctacaatgaacttaaacaaatttacaagaaaaaatcaaacgaccccatcaaaaagtgggcaaagagcagtattatttttaaatgctcaataagtttatttttaaaattggatttgagaaacttggtaatgcctcatttattgcttttcattaagaatagagttctgggacgggtgcagtggcttacgcctctaatcccagcagtttgggagaccagggtgaacagatcacatgaggtaaagagttggagaccagcctgaccaacatgataaaaccccgcctctactaagaatacaaaaattagccagatatggtggtgggtgcctgtaatcccagctactcaggaggctgaggcaggagaatcgcgtgaacccaggaggcagaggttgcagtgaaccaagatggcgccactgcactccagcctgggtgacagagtgagactctgtcttaaaaaaaaaaaagaatagagtgctgcctgtaatcccagcactttgggaggccgaggcgggcggatcacaaggtcgggagatcgggaccacagtgaaaccccgtctctactaaaaatacaaaaaattagccgggcgcggtggcaggcgcctgtagtcccagctacttgggaggctgaggcaggagaatggcaggaacccgggaggcggagcttgcagtgagccaagatcgcgccactgcactgcagccagggggatggagtaagattccgtctcaaaaaaaaaaaaaaaagaatagagttctgaatataagattttcaagtaaatcactagaactttaaaaatattaacactttgctagataacttctaaaaacacctgtactatagtgtagttcaataaaagcattcagacattttttggtgagtagtataaattggaaagttcccaaagtcgtcatggctttcagcaagtatcatatcatgtagtcctcacatgaaacatcatcagtattaccaaaacagtatgagtaagccttgtaatttgcttactgtttgtctgattttctagttagtttagcattaggaacatggtcaggaatctcctgggcactttggaattgttaccaaggagagaagcagttatgatgtggtttatttattcatctacaagaaaatatatacaagtaagcaagcaccattagaattcagaaatgtgtgagatcaagggacatcatcctagcatttgaattattgcccaaaaaaatacacaaatgtaatggggatactctattattaagtcatttaaacatttttgtgaatagagagaaatagcacttttaattatatggacaaccactgacatttattatatgtaataagaggcctggtacacacatgaggaggtcagacttcttgtagaaaataaaagaatgtttgcttattttagtgactcctttttggagatctgtagggtgagctccctcaaagctaataaaggaggaagattcccttttatctaatgactgctaggtattttgttacatcactgtaagaggagatctactcagtagaggggttgatttcttccctcaggttcacacattgattgctgctctcaaatttgtcctcagctttcacacaacagtttgtactagcacgttaccactaccacctacctgccccctcagaaaactaggaaagttcttacctgtcccattttatcaatgaatttgggggtcttgtacttggaagaatagaaacttacaagggaaatttcaggttttaccaactagatgtaggtttcacttttccattggaaaagattgctttattaggcatatttgagtttattcagtttgtcttttcatgggaatttttcttctgtggttttcagtataaaacaatgcagcaaaatttagttaaatgggttttattaactttttggttgattcatacctatttttaaactcattttgcttttgtttaaattgtgcattaaaatgtttaattatggaacatgtaatgattgatgcaccatcaaaacatttgtagttttccctaataaactgtgtggctttttgatgaatagttttcatgacatcttcagttgactgaagaaatttttatcacattaatttttctaaagttttctggaatttcttgccattttgttttaaaccatgtgtttaaggtaacacagtctatcttttatccttcctatttttcatttttctctcagttttccagagctgtcccacttcattatggacttttttgttcccttaattacccccctactctcaagcttagcacacatgtctagtaaataaatattaccttacatttcaatttcaatctcttctacactcctcctctgccttcaagaatacatatactgtgtctgatcctgacaagtgctgttgctttgctgtttctatcctccaaaatgccaccgttttttctattctttcactgcagtttatattcaccctcactgattccatttccttatcattcattgccatgggtagacaaagtgattcgaagtaggtagtaatggttgggattgaaaaataaaccattttgaaccggttgagatagcccttagaagtgcccatagtctgtcctcataaaaagtgtggacttagagtggcaagaataggactatagcaagagtgcaaggaggcttacgttataagtaacagttaacaacttctttgaagtagagaagactgaacagatgaaagcaatggatcttaaagagtgcctgtaattaaggaaaagaagaacaacaatggggtgtaaaagttggaactatgtagaagtagtagtgactgttcattttagaattcttaacttctaggatgtttgcttgaaaaaggtttacaaagtaccccccttcacatcttggaccccgccctcacccacactctgtgtcttcaggtgtggcaaagcctccgagatcccagatcttttccatttcttgtcttcttaatttcttcagttctttcccccttacccttcattagttacccctctctccttatctaaggccaaaatgacagtctatttacatacatacatctatagatttacatctataaaactatttacgtagtatttactttgtattaggtattataagtaatctagagatgatttaaaaagtatatgagaggctcaggcatgagaatcacatgaacccaggaggcagaggttgcagtgagccgagatcacatcactgcactccaacctgagcaacagagcgagtctgtccaaaatataaaataaaaaataaaaaagtaaagtatataagaggctctgtgtagattacctataaatactactccattttatgcaagggacttgagcatctttggatttgggtatctgaggagggtcttggaaccaggcccccaggataccaagggataactgactatacattacatattcttgtccagactaagaaacaaaactgctatggccttcaactgggcattcagatgcacagaaggataggtgatgtggtaagagagagtaaatatatgggagaaaatgggcaggatgggccataaggagagggaccacagaccactgatacgccgtttattttatagattatttttaacagctttgtcaaaatgtcttattaaaaactccggtcctcttttcattgttagattttattttaggtatcgggcacatggttatcgagatgttttcatttgacagtgccgctgtcctaagtggttgcctttcttgccagattgttttttcagttgttcttgtcaatttctgttgatcagacaaggacagttatctttttatctccctatcctgggaccttacgtagttcatgttcaatactgttaggtggatggatgggtatgtgggtgggttgatggatggatggattttaaagaagcctttctatattaggtgattttaattgagaagggtaaatctgaatttctttagaatgaaaaccacatattaatacttttttgtacctggaaccataaagttttcagccatcacaattgctagaaattattttactttcctgcatataagactgtgggttaaaattgaactgatttgaagtaaaatggcataggagctttctgttccttaacaagaaccaaaatagctaccaagtctgattgtgagaaaacagtgtctcctagaacctgataattagggcagtagtcttcaactgtcttcccagggaagactatttgatgagctggactaaattttctcatttaaggggaaaggaaaatgaatagtcttctctcagttttaagcttttcctttcattcatttttaataaatcttagcatcaatttgttgcttttctttaccacaatctgatagcatttaatatgtaaattagtacaaaatttagatatttaggtaccaatttgaataaatattattggcaggggctttgcaccagaagacattttaaaactactacattaaaaatacaatttcccttgctaggggcttagaggacgggattaatgtagagtgactgcttgtgagtttggggtttccctttggggtgatgaaaatgttttggaactagaggtgatggttatacaacattgcgaatgcactaaatgtactaaatgctgaattgtgctgaattgtacacttttaaatggtttatgttaatataaattataccttaatttaaaaaaaaaaaaaagcttttcttgaactttttaaagttcatgctgtatctgtgaattgccaaagtgtgtgctgtagctcagaggataatgtactcctgtagctagttatggttatgattttttcttcaaactgtgaaacatattagagtgaaaattagtacttacaggctaaatacttaagtaacaagcatgaaccagggttatcccaggtaactgggagaacctaaaactaaactgggagaacctaaaacattacctaaaactaacaacaaatgcttttatgttcaagctcgctaccactacttgctacagaacttgattcttcagagaaataagtacatttgacagaaacagcttcccccatgcagataaaaagcctatttcaaacttgtaaaaagtaacaaaaataatcttactgagtaaattggataaagacattttcagttttaataaaagcagtgatactttaaacaaatgtttctcaaatcctttttccactagtgtctagataagtcttatctgccgttggctcataaacagctgggtaggttggtcagtacatccagttgtacatacatacacatacagacacacattctcattcatattctctctgctatgacaccaccaccatttaaaaacataaagaatatgtttgtacagtatttcctgtagtcaaatattgccagagtaggacaggaagacctaatatatttacatcaatgaaagatgcagatatgtcttattaatatacctactccaaaactttggccacatctttccccgagatatttttagttctcagacataattttagcagataatgcctttgttatgtatcacagtgcttctgtgggctttttctgtaagttgattactgactcatttagctaatttgagatacaggtttgtcatgtgggttttttttccccctgttaaactggtagggttttgtttttggttttgttttgttttgttttgttttgtttttgagacggagtttcgctcttgtcgcccaggctgaagtgcaatggcacggtcttggctcactgcaacctctgccttgcgggttcaagtgattctcctgcctcagcctcccgagtagctgggatcacaggtgtgtgccaccatgccgggctaatttttgtattttttaaaaaacctattctttttttagtgattattattatatttttaagttctgggatacatgtggagaaggtgcaggttggttacataggtatacgtgtgccatagtggtttgctgcacccatcaatccatcgtctacgttaggtatttctcctaatgctatccctccccttgccccctacctccccagcaggccctggtatgtgatgctcccctccctgtgcccatatgttctcattgttcaactgccacttacgagtgagaacatgcagtgcttggtcttgtgttcctatgttagtttgctgagaatgatggtttccagcttcatccatgtccctgcaaaggacatgaactcattctttttttatggctgcataatattccatgatgtatgtgggccacatttactttatccattctaatacattgatgggcatttgggttgcttccaagtctttgctatcatgaatagtgctgcaataaacgtatgtatgcatgtgtctttatagtagaatgatttgtaattctttgggtatatacctagtaatgggattgctgggtcaaatggtatttcaagttctagatccttgaggtatcaccacactatcttccacaattgttaaactaatttacactcccaccaacagtgtaaaagcgttcctgtttctccacatcctctccagcatctgttgtttcctgactttttaatgatcgccattctaaatagtgtgagatggtttctcatcgtggttttgatttgcgtttctctaataatcagtgatgatgaactttttttcatatgtttcttggccacataaatgtcgtcttttgaaaaatatctgttcgtatctttcatccactttttgatgggttttggtttttttttgtaaatttgtttaagttgcttgcagattcttgatattagcccttttgtcagatggatggcaaaaatttttcttattctgtaggttgcctgttctgataatagtttcttttgctgtgcagaagcccgttagtttaattagatcccatttgtccattttggcttttgttgccattacttttggtgttttagtcatgaattctttgcccttgcctatgtcctgaatggtattgcctaggttttcttctaggatttttgtggttttaggtctaatatttaagtttctcatccatcttgagttaatttttatataaagtataaggaaggggtccaggtataagatatagtttaatggtcttctacatatggctagccagttttcccagcaccatttattaaatagggaatcttttcccatttcttgtttttgtcaggtttgtcaaagatcaaatggttgcagatgtgtggtgttatttctgaggactctgttctgttccattggtctatacctctgttttggtaccagtaccatgctgttttggttactgtaaccttgtagtatagttcgaagccaggttgtgctgcctccagctttgttgtttttgcttaggattgtcttggctcttttttggttccatatgaaatttaaagtagttttttctaattctgcgaagaaagtcagtggtagtttgatgggaatagcattgaataatctataaattactttgggcaatatggccattttcaccatattaattattcctatccattagtatggaatgtttttccatttgtttgtgtcctctcttatttccttgaacagtggtttgtagtcctccttgaagaggtccttcacatcccttgtaagttgtattcctaggtattttattctttttgtagcagttgtgaatgagagtttgctcatgatttggctgtttatctattattggtatataggaatgtttgtgatttttgtcattgattttgtatcctgagactttgctgaagttgcttatcagcttaaggagattttgggctgagacagtggggttttctaaatagacaatcatgtcatctgcaaacagataatttgacttcctctcttcctattcgaataccctttatttctttctcttgcctgattgccctggccagaacttccaatattatgttgaataggagtggtgagagagggcaccctggttttgtgccggttttcaaagggaatgcttccagcttttgcccattcagtacaatattgactgtgggtttgtcataaatagctcttactgttttgagatatgttccatcaatacctagtttattgagtgtttttagcatgaaaggctgtagagttttattgaaggcctttgctgcatctgttgagataatcatgtgttttttgtcattagttctgtttatgtgatgaattacatttattgatttgcgtgtgttgaaccagccttgcatcccagggatgaagccgacttgatcgtggtggatatgctttttaatgtgctgctggattcagtttgccagtattttattgagtatttttgcatcgatgttcatcagagatattggcctgaaattttctttctttgttgtgtctctgccaggttttattatcaggatgatgctggcctcataaaatgagttagggaggattccctctttttctattggttggaagagtttcagaaggaatggtaccagctcctctttgtacctctggtagaattcaactgtgaatccatctggtcctgggctttttttgttggttgactattaattactgccattggtctattcagagattcaacttcttcctggtttagtcttgggagggtgtatgtgtccaggagtttatccatttcttctagattttctagtttatttgcgtagaggtgtttatagtattctctgatggtagtttgtatttctgtgggatcggtggtgatctcccctttatcattttttattgtatctatttgattcttctctcttttcttctttattaatctggctagcagtctatctattttgttaatcttttcaaaaaaccagatcctggattcattgattttttttttaagggttttttttgtgtctgtatctccttctcttctgctctgatcttagttatttcttgtattgtgctagcttgaatttgtttgctcttccttctgtggttcttttaattgcgatgttagggtgtcaatttttacatctttcctgctttctcctgtgggcatttatttagtgctatataaacttctctctaaacactgctttagctgtgtcccagagattctggtatgttgtatctttgttctcattggtttcgaagaacgtatttatttctgccttcattttgttatttacccagtagtcattcaggagcaggttgttcggtttccatgtagttgtgcagttttgagtgaatttcttaatcctgagttctaatttgattcactgtggtctcagagactgttcgttatgatttctgttcttttgcatttgccgaggagtgtagatatctatctacagaacttggtccagagctgagttcaagtcccgaatatccttgttactgttctgtttcgttgatctgtgtaatactgacagtgtggtgttaaagtctcccattgtttttgtgtgggagtccaagtctctttgtaggtctttaagaacttcctttgtgaatctggatgctcctgtattgggtgcatgtatatttaagatagttagctcttcttgttgcattgatcccctaatttttgtatttttagtagagacagagtttcaccatgttggccaggctggtctcaaactcctgacctcaggtgattcacccaccttggcctcccaaagtgctgggattataggcatgagccaccgcgccccgcctaaactggtagtttaatgcagaatcttattttcactcttaccaataaaatggttttgcatacaaagttaagagtggactctaacgtttgtgtcttaaccttctatagaactgtcaagtaatccacctctggctaccatccttattcctcctcatgctcggattcaagcagctgcttcaacccccacaaatgccacagcagcctcaggtaagaacgttctaagtctcttctataaaaacatattctgggctgggcgcagtggctcacacgtgtaatcccagcactttgggaggccgtggtaggtggatcacctgaggtcaggagttcgagaccagcctgaccaacaaggggtgaaacctcctctctactaaaaataaaaaattagctaggtgtggtggcaggtgcctgtaatcccagcgtctggggaggctgagataggagaattgcttgaaaccgggaggcagaggttacattgagctgagatcgtgccactgcactccagcctgggtgacagagaaagactctgtctcaaaaaaaaaaaattgtttttcaaaagacatgattacctttcatttcatttgatgagtatgaacatttaataccttttatgtatcaaaaacagcacaaccaaatgagtaaacctgaataaaattttttgctttatttccaaaaagcataaaacaaaagtacccaccaggaccttatatataagatataaatatcttctgataatgatgttaaattctgtcatcttagcaaaaggatcacttgaggccaggagttcaagatcagcctggacagcatagtgagaccccatctaaaaaataaaaataaattttaaaaaattttttaagttaacggtttttatgtaatttcagtaggaagtcaaatcaaatgagatgtttatagctgaaaacataaatatattgttactgaaaataattcacttttgtttttttcccctcgaatgtaaattatagtagtatactagagaggcaaatttccaagaagtataagctataagtttatacttatatttaatcattttctttaatcatttgaaaggactaaaactgcaatgcaaatacgtttagctgagatttagatcagaatgtgacgagactcttatataccaaaaaaaaaaattattcacgggttagagctagggtgtactgtgggcccgaagccagctaatggtgaggcctgatttagtgagaatcggtgtccttggagatactctgaaaatatccaacccttaagagtgaagtgaagttcttccaaataatgactggatgcttttaaaacttaaaagcttttaaaagctagaaacataataggtagcacaattaggggctcagaatttggcacctttattttctctctctctgtccaaaaagctaatggcaggagctgacttcattttctttaaatagtcttgaactgagttggatcagatccatttttgcctaagggtatttatgctgcaggagagaaaatctttgattactagttctcatcattaaacagtaaggtcaaaaaccatgtcccgtttgatatggtgttgtttctgtctaatcttaatcttttaaaatgttgctaataaagatataaaacattctagttcatgttcaggaaaagtctggaaagaaagatctcttttcttgttccaagtttatcagcacatgctaccttgagaaagtcatttgaactttattagttttattagtgtcatattcattttcccagtctgtaaaatggagtggcaattactttaggacaacatttgtctttacttgtctttatttgtctgtactttaggacagcattgccactccattttacagttgagaaagtgtgctgaaatctgctttaaagtgtttaaggtaaaaatattttttaaagtatgacctatttagaatcaagacagaattgctatgagccattaacaaatataatactggcccaggttacattaattgtttacaatatgaaaaaggccctaaccctgaactaacacatttacttattttattgagctcatttccacagttttacttagaatggctttacacggtgtataaaaatgagtaggttttgagcagtttaaactaactttcttaatgcaggataccaaacttaattaatgattgtgacttatgtttttgagcaaattgtctgcttagtaggagcttagtataacctgattttcatgttgttttgatacaggttacagcaaaccacaaaataataataataatttacatgtgtatatttttacagctgtagaaatcagatttcaacataaaaatagaaactgacattgaactttgactctgagagtttactccaaagttgaattggggtatggggaagttaatagaggaatggtaagctgaggtcagagctaaaattagtttagagaaatgcatgctttgagtaccttaataattaccaaagaggatatttcagatattggtctgagctaaagtaaataaagaagtgttataattctgttaaaattttccattgttcattagataaaagcacactggtgtcatagaaaaaacggtgtttctggccccgctgtttaagaaatatttctcctttagggcctcagatttgttactgaaagagatagagtaagtgaacttaacatcatcattttaacaagaaatgtgagtttcaaatagataactttttttaaagttcccctcattgtaacccaaaaacagtttaaccacagtatagttaaacagttttctatggcgctgcagtagtgaagccccaagtatgtcaccaaacatacctcaggaaatgctggtctagaccaagtgattgattgcttggccttctgggtgcctgtagttaaagattcatgtatactttaaataagaatttgtcagtgtgagttacattcttttgtaagaccttaaaatatataagtccccagccaggcgcggtggctctcgcctgtaatcccagcactttgggaggccgaggcaggcggatcacctgaggttgggagttcaagaccagcctgaccaatgtggagataccctgtctctactaaaaatacaaaagtagccgggcatggtgacgcatatctgtaatcccagctactcaggaggttaaggcaagagaatcacttgaacctgggaggcagaggttgcagtgagccgagattttgccattgcactccagcctgggcaataagagaaaaactttgtctcaaaaaaaaaaaaaaaaaaaaaaaaaatatatatatatatatatatatatatctcctctgtttctcttagatttggtttccttgtccaaaagcaggaataataaatatccactacatagagttgtaagaagtaagatataaagtgttcagagtgcttattagcactttgcctgcccatacagtaggctctcagtgaaaggaaactgctcttgctttttttattactgtttttgcaaagttaaggacacatcagacatgctttttttaaaaagccatgtggagggcaggattgacatccatcctctatgacaaaagaatctatgacttttctttcctggataaatggacatgcatctctccacactgtctagacagagtgagggactgctaagctacagacataaccaaagctttcctcacaaagcatttcaggatctgctccagagtccaaaaaaataaataaataaactgttaagctataaagttctagaccttgaatatctgaacctggaaatatttcaaatttaaattttcaaagaatttcttatcacccacctaagctacatcaccatggtaatataccccaaataacctggggagaattgattacactatgaacccctaagtaactaaactagttgtcatacttaatttaaatcagtgtaatggagcacataacatcaaaatgattcatattttagaggtggagctacttttagtttataacagtcatatcaacaagaagcaaaataatacttaacctgttttcagtagcctgagaatgtgcctgcaaatcatctaaaaatgaccttgcatcactaaaatacaaattcaaaagagtaccataactgaattatcatctgatctgttaaaatatcattcctattgttgctcagcatcatggcaattgaggttctgtcaagtatatttgtgtctagagcaagatcatcggaatacagaggctcctagataaactgcttgggacactttttacgttgcttatagctggcttaaacaagaatggagttttctgacatttgtgtagacctggaaacaaagctcaatcctaaagtatgtggaataaaagcagaaaaacaaagcagattgccaaagatgccatcaaccatgatcatactgactatattatggtgaaatcaacttcagattttagtcagttactgttgttagccaaagctgttaaatggttttcagatatttaagtcttaatattttaaatatattataggctgaaatctaattctctatattgctgcttctgaaaaaaagcaaaagaaaatagacattttcagccggcgcagtggctcatgcctataatcccagcactctgggaggccgacaggggcagatcacaagatcaggagatcaagaccatcctggctaacacgctgaaaccccgtctctactaaaaaatgcaaaaattagccgagcgtggtggcgggcgcctgtagtcccagttacttgggaggctgaagcaggagaagggcgtgaacccaggaggcggagctcgcagtaagccgagattgtgccactgcaccccagcactccagcctgggcaacagagtgagactcttgtcttaaaaaaaaaaaaagaaaatagacattttcatacccagattgtggcctaaaatcataccatcctaattctaggaatatataattattctctgtcatcaccaacaaactttgactagtacaacaaaatatcacaattctttctcaccttctttgaaaatggtaaagattgtgccagtattaagtttgaggacattaacactgagggaactatttttgcagatgtttcaactttccttttgttgtgttctgcaactatatgtgagctgataaaaacttatggtaaagtattatagtataaaacaagagctgtcagaattcagactttttagttcagtaattccactttagggattttaacttcaggataaatattttggaaagaaaaaggctaccatgtacagacagaggaatctcataatatatataataataaattatataataaaaattctgtattaatatataacaaaaaggagagccaatgtaacctgaatggtcaatagtaggaaattgttttaatacattacgaaatctccgtttttatgcagccataaaaaacaattttcctgaagcttatggacattcgtggaaatactcatcctaatttatgtagagaaaattttaaaatctcatgaaccttgttggttactattgtcaaaatgtttattttcatgtggatagggactagacagaaatatacaaaactgtaaactgttgtgctaaattagtgggtatggatgttgacttttttttccgaaaaaatattctttacaagttgtttttaaaatgctttagtatctagaggcattattgttaatcatggctctgattgacatgagaatctcttgaaaattacgcatactactctcaattcttaaagtataatttatttggtgtgtgtgtgggttttttttgtttgtttgtttgtttgttttgagacaatcttactctgtctcccagactggagtacagtggcgtgatctcagctcactgcaacctctaactcctgggttcaagtgattctcatgcctcagcctcccaagtagctgggattacaggtgcgcaccaccatacctggctaattttttgtaattttagtacagacggggtttcactttgttggccaggctggtctcgaactcctggcatcaagtaatctgcctgccttggcctcccaaagtgctgggattacaggagtgagccactgtggccagccaaaattcatagtataatttcttatgttgactgaaaaaatatatatatatattttatatatataaataacatataatatatatatgaatggtcaacataggaaatgttcaacatttatatatataaaatatataatatatattatatgtgtcttattttctttgtatgcccagtcaactcattcactccatttaggagaccatgcatctggaacatctaaagtaataaatctcaagacattactgttttcttaatcaaatacaaactgttttagagatcatctgctcagatgagttgaatgtgagatgttgtagggaatttcaactagagcagttttctgtgtttatctctttggtatattggtcatctgcataaaatttctttcaatgcagtggttctgctgttaaaaaccactgatttcagtccacccctcattatctaccgagaagtggtcatctatcccatggttatgtatattcagtaatagacattactgcaagaatgaacacctttttatctttgcatcactctattagaaaagtttatccttttttcaccctgaaatttatttctgtatgccttcttccagtcagtgattctactgtgaaattataacagaaccatctagatccatgtaaaagtccttcaaatgttaatgatagctaacttgccctccatactaatgacagctttaactcctaatcctggatttgttctaaagtattagggtgttggattttctacacaattgtatgtcatctgtacatttcataaacatgtcagttttttacctctatccaagcaactaataaaacatatcaaagaggacaaggcagagcctactagaaatgttttgcctttattcaagttactgataaattaattggaactggactgggtttcctagaaattactcttctggtggtctcttagttgattggtcattcctcttagtgactggtcattcctcttgtttgcttaactacagaccaacatttaaaatactcatttgtatgaggaggttgtaaaaaaaacactttgtaaaatgcttctttcttttaagaaaactttcagcttttttccataaaaaaaagaaaagtaaccatatcaaagatggaaatcaaaccgttgtttttaagacttggggaaatttctagtgcctaaatatctgtaagctgtgagtttctgtaatccattttagatttgtttcttggactatagattgtgagtttaaagacatttaaaatgtatacattgcccttacctttcttgaggcacattttttttattaggatttttgttacatcctttcaagttgaaaacccttctaacagaagagggaatcatgataacatttggatgaggtcattgtacgtggtgagccaacttaacttgtcttcatcttggtttgaaaagctcttgctgttactttatttgcgttgagattattgcaattacttgatcaaagtttgttcatacttttctatttcttgttagttgttagcctcttttgaagactttagcaccgaatcatacctgtttgttcttcaaacttctaaaaattcatctggctaaaatctggttcagattttgctatggctggtggcccctttgtcttacaattacaattattttcacctcagaattcctgttacctacatactagccaattctttttagttgggcagaattaagcacagaataatttctctcattgtttgtttctactgtttttgagaggtgaaatgttaagcaaatggtcagtttattagatgcttgcttttctaaaatgagagttaccctccctcatcctttccccaagtactattaatattatacctggcctttgggccagttttacagtgtacattgggaaagctgtattcatattctgtctaatgtagaagctgcagtgcatgccctgttgtttttctttgtaaagttcttcctgttttctctgtatcttaacccaaatagatgttaaatttcataaaagtctgcaactttaaaaaaaaaaaaaaggcatttttgtctatcaagaacataatagtgtatagttattttaggaaataaaaattacctctattctactttcaaagataatcacacataacattatgttttagtctgtatatgaatgggcagagagacatgcttttttaaaaaatgggcttaggctatttagagggtgaaggtatatgactatagtattcagccaatatcctaaggctataccataattaacttactattcttggacatttggtttgtgttgaagatggggttttttgtttttgttgttctgaaaaatgctttgaagatatctttgcataaagctgtacttattcttctaaatttttagaagtagagtcaaaaagtataaagaattttaaagtttaatgtcaaattgctttccgaaagcttgtcccgctgtcagttcatactccccactgtcaatacaggtacttttctatttccccattgccccatttcctcgtagagtgggagtaggggaagtacagtgtgcatgtgtgcacatacacatttttaggtgttaccaacttgatagccaattaatatgtgcatctcttttaggtacaatgctgcatccgtttcctcctgtgggctctgcatctgaaatacagacttccattttgaactataccattttgacaaattcactgacaccgagattatatctaccccatgttagagtttcaggttcactttgtgagtttgtatatagatacctaaaatcaaaccagcttagtcattattctcaccagagcagtcctagacatcacttctagaagttctcgctttctgtgcaaaacatgttctctcctatcaagtcaaaaattttatttgggtttttccccccctctaaaagtaatttaaaatctggattaagttggaatcccctatcagacatttttccgtgtatccctgaagtgttcctcagttccttgcctaaagtcacctacttttatttatatgtccctttttttttctttattcctaaattaagcattttaacttaaaggaacggtgaaaatgttacctgtgtgtccccatgatcttcagttttctgccctgagcagccaaacttcttaaataaaatgtgccctgccccagacctcacagggaactgagacctctcagctgccagcagatcaaatataaacagtcttattgacaggtcttctaggtatcctggtgaatgggttgactcacaggcatccaaattttacttctatttttataatcactgaagtctaccttagtgttctgtgccatatcttttccttacaggtgtactttgatttcatgagtgtaaattataatttcaaattaaatataagtttagggtatactttgattctctgtaattatcttgtttgttcatgtgccagttaataacactaacatctaagacatagttttacagtagaagcatttccacttggaacagcttgagtaggaacatcctgagttaggtacacagtataaataatatctcccaggctgttaattttatcttctagagagattgacctgtcataagacatttttaactattatagaaagaggacacctgataaatagaaacacataaaatgtgcttggaagagattgttgttgggcaagagcatagtaaaggaaataagggaataaaaatatacctggccgggtgcagtgactcgcacctgtaatcccagcactttgggaggtcgaggcagtcggatcacttgaggccaggagtttgagaccagcctggccaacatggcgaaaccccatctctactaaaaatacaaaaaaaaaaagaaattagccaggcatggtggtgtgtgcctgtattcccagctacttgcgaggccaggagaaccccttgaacccaggaggcagaggttgcagtgagctgagattgcgccactgcactccagcctgggtgacagagtgagaccctgtctccaaaaaaataaaaaacctaatgtttccaagtgtacttataaagtgcatgtaaaacacaaaaagactcatttgatatatctaaaatatgttattttactaatatgccagcaatagaaataataaaatatttaataattttgtagcttttggagaacttgaaatgtgttgagaacaaataaggaactgaattttaatctttaatgtcagttactttaaatttaaataaatcgccttatgtagttagcaactactctattagagaatataaatagaacatttctgtgattgctgctgggccagatagtgagcatttcaataaattagaagaattaaatttttatggacacacagatccagaatactgattcatggtggcagagcctttggaatcctgtctcctatgtttattttccctctctcctcccaacccatttccttgtttttactctcttttcatttaaatcctttggcagtaggtgtaagtggagaccttccattcactctccttcctgctcctcatttggacctttgatcaaccacatttgggacagggagcatggacaggaccatttgtgggcagggggtggggggatgcagacagcaaggaatcaaggcaagaacttctgtgtttatgacttgagcatttgagtggggccgtttcctcagtattgagacagttgatccattaatccatgactccattatctaacaactcttacagatctcttgagaatcttaaaaaaaaaaaaaaaacactgtagatcctgtcctataaaaagagatgtatgtataccagatatggaattttacatacgaaaatgtactccaggacaaaaatcacagccttatggactcttttgggaacctgatacttaagggttctacccttggcttcactgtgggattgcctaagttgtgttttacatcttatgtcacacagaataaaattggttttaatacatgtgccaatttgctttgcagtatctggtacaaagccatagagccatgaatttttcagaaaataattgattcctgagaaaacaattctggaaaaaagacttaaatctaatataatcttttttttgtcttgtacagtttcttagaagcacacctaattatgtagggagactttgtcagtgattccctcattggcttgtgaatgcaaaccctaaatgtcatttaagttctttgacatatgtatttgttacctatttctgcatattactttaccccccaacatttagctatttaaaacaagagtaaacgtttattgtctcacatagtttctgtgggtcagggatttagaagcagcctagctaggtggttctgggtcagagtctcgtgacatagtcagaacattagctagggatgcagtcatccaacgacttgcctgggggcagaggctgtacttccacagtggctgtcattcatgtggttatcaaatgtgtgctggctgtatgcaggaggcctcagtcactcagtaactggccctctccatagtgctacttaagtatctcacatcatggcagctggcttcccctagactaagtaatccaagaaagaaggcaacgcggaagccacagtgtcttttatgtcctagccttggaagtcacacaccgttgtttctggaatatcctattagttacacaggtcagtcctattcagtgtgggaatggactgcattaggcatggataccaagaggcatgaatcattggggtcatcttggaaagtagctaccacagtgtgtaaggatgattttgtaccttcctttccttccccacaaagctgattgttctgtctgtttcctcttaagtccatccttggtttgggggagtttttttgttacttgtttgtttttccatagtagtattagacaggtgataatgggggttggtttataggaagcttcaaagtcagtaaaatgttagctctgtagttgtttccagagcacttatttctctgtacaccccatactgaaaacaaagtaactgtgctgttaaattttcttatcacaaactcactcttctcttttaatgtaacgtctcttacagataatagaaatgtgcctgtagaaatcacagtgattttattgaggttagttctaaatgaaagtcaccttaatctcttttcttcttttgctaggaaatcttttctgctgccccctaatgcccataatatggatcattctccttccttgtgctctgtgttccactcccctgcttattagctacatggtcttgggcacattccttaatctatttgtgcttcctttctcctatttgcaaaatggaggtaacagttgtacctatttctcagggttgctgtgtgagctaaatgacatgactacaaaatacttagtgtgatgtctggcatattggtcagcagtatgctgtcgttagtatttactttattgatgttggttattgcagtcacactagattatacatatatgtgtttttagatgtcccttttaccttcccatctattgaacaattgctgtatgccagatactatgctaagcacttcataggcctaatttcctaggtaggtagtatcactaccatttaccagtgaggaaaggagagagagattaaataatgtgttccaaaatcacacagctattaagttgtacaagtaggcttcatactcaataaatgtttatagagttggtttagttttaagaaagatatatcagtgtgaagttcagaagagcatctctggtggaaaacaagagactgtagagttggttaatgatctatagtcagatcatttataatgaaaatgatcttagcctctcttttaaaccataatgccatttagcatcactttaccagtgcatatgtaatgggaagggaatgtaaggagaagcaaatgaactttattgtttttatgttatggagtcactatttaaatgtttgagaagaaaagttacagaaattacactaaatccaatgacgatttatcaaaattttaaatgaataaacatttttaatagaaaactcattaattcagattccattgtgtaaaaataaatttacagaatgatggtgggaacaaaataagcatgtgccaaaattcgtttcttatttctaaaaagatgttaatctgtgttatcttgtttcctgattgttcttgaattagtttcttcctagccaccaagaggtcagctcctcctacttttcttggccaaggggccaatccatctttatgatgggattgtagagattatgagatgtaactttattcagtcagtaattgggtggtcttttaagcctactattgagtattgaatttatagaactttgccttttttgttttactttttccctctctgtactttgtcttcctctgaaaaagagaactgtgttcttctcagcaggacatgtgtgatttgattttaagtggagctcattgcatcaggcgcaagtttttttgaagaatgtctataggactgtgacttttgatatcaaggatatttataatcaaaataattagccattaaaattatgttcactaagtgatttgaaaataactgaagagaaaaatatgaggtaattacagatctgaagagcatgggtgtccatcaaattttattcagaaagtgaatttgtttctggttttatgctcacttaaaaggcttgtgctaggccgggcgcggtggctcaagcctgtaatcccagcactttgggaggccgagacgggcggatcacgaggtcaggagatcgagactatcctggctaacagggtgaaaccccgtctctactaaaaaatacaaaaaactagccgggcgaggtggcgggcgcctgtggtcccagctactcgggaggctgaggcaggagaatggcgtaaacccaggaggcggagcttgcagtgagctgagatctggccactgcactccagcctgggcgacacagccagactcagtctgaaaaaaaaataaataaataaaaataaaaaaaataaaataaaaataaaattaaaaaaaggcttgtgctttttactgtgatcatgcaagcagtcactgaatgtatccaagaaagaggagactggttttggcagtgtcacaagctcacagactgtagtcagtgaaaggacatctgcacattggtgccaaataggattttgctaaagagcccattaacataaatgggctggtggccatgtagatgaggtaaaactgaagtcagccctggctgatgtcagccagtgtagttaatgggtgctgtggccagagctgctctccatgttggcatgggtgctgatgtagtggtcaaacagatagataaatttctgatgatcagtgcctttcttaagtcctggggaagaccagaatgacagttctacctgttatcttcccgtactgaaaatgagaaggaaatgctgtttgatgatggtcatgcataggttctgagtgtcatcagagcatgtgacacgctgcaataagcatgggtttgtggtgttccaggttttctctggattttttttttaatgcagcctgtgcctgaatcatgaaaatgaacatttttatctgagaaaggcttggaggaatctgtggtctagacaggaattgatgttaggttattgatgcgcagaatgtggatgatcattgagggtaaaacttcctttaaacagggcaaacctaaggaaggtcacgaggtacgaatgaagtgttagcatagttcctcagtgattattagaaaaggtggtcatcctggctttggagagtcggttctatgtcatgtaccctttcctgccacctgttcatttgccataccgataaattaatatgaccccatgccatgggctatatgaacctcatgtgtggattccgatgccataatatcttcacttgtgtacatgataacgagattagaagcagctttagctattttgaaggaaattaaatgaattaaacctaatcattcacattaagagatattcgcattcattccccaaaggctgtgctaaatgtatataagggcagattatcaggaaattaggaagtataatttttatagattggctttagaaatgagaaactgaacagctaatccatcatagagttccctatgtgtccttgggtcttttgtgtctccctctaattcagaaattcaaagtagaaagatccaggaccaaatgttaacattcaaccatgacattggttattctgctcaccatagcacatggtagatccacaaatcccatcagtcctagagagacaaaaaacttctgagtctgccttttggtgtcaccaaccttgatggcattgtggcttctagagagatggcttttcaaagttgcccatcccagtcaagccacttctcttgctcagggcttagtgtgaaatctgggaaaaaatttggctagcagtactttcccagtcattagtgagatgacaaggatgcagcttgatagccactaaaacagcaatctactaaaccaatttggacacagttagatgcccacttaaatgttaatggatgctgtgaaataataatggaccttaaaagggggaaggagaccatggttgtagagttgtacgtatttctaaaagattagggcaaagtaagctctaagtaagttctaagtcaggatttgactacaagatgctttcctttttttaatttttaatttttgtggggacatagtaggtgtatatatttatgggttacctgagatattttgatatagacatgcaatgtgtgataatcatatcaggataaatgggatattcatcacctcaagcatttatcctttatgtttcaaaccagtcatacctttagttatttttaaatgtacagttattttttttttttttttactatagtcaccctgttttgctagcaaatactaggtcttactcattatttcttttttttttgtacccattaaccatccccacttcccccaccctcgctacccttcccagcctgtggtaatcatccttctctctatctccatgagttcaattgttttaaattttagctcctacaaatcagcgagaacatgcaaagtttgtctttctctgtctggcttgtttcgcttcagataatgacttccagttccatccatgttgttgcaaatggcaggatctcattctttttcttttttcttttcttttctttttttttttagacagtatcttattgtgtcacccaggtggtcttggctcacttgcatcctcaatctctttgactcaagcagccctcccactcagcctcccatcattctctcttacagctacatattactccattgtgtgtatataccacattttcttttatccattcatctgttgatacaagatgctttattaaattgactgagtgaattggtactgcacttgctgtttcttttttgctggttgtctatcttccatctctatgaataatgaagaaggactgttctgcctatgaacactgacccacgttactttcattgcctccacccatttactcacttaagcagatgtaacatggttcagaatttttagcaagttttcccagctgtgcactgttcatttattttcaagtgagctagactccagctgagtgttcatatacagctgatcccagctgtagcaagagctttgactgaaacggtctctggctccctgagtctgtaacttactcaaagacactgttttccctgtaccaggaccatggtgaggcatgaacttaaatccaataaaagagaaattcagagttcatagtgttggccttatttaaaacaaccttccaaataacagcttggaaggccatacaattcacagcctgcagttggaacagtgtacttgttctctttcgctgttgtagcattgctcatgctctcttttgggactttttgacttgcagatgctaatactggagaccgtggacagaccaataatgctgcttccgcatcagcttccaactccacctgaacggtcccgagcagccagctgcacaggaaaaaccaccagttacttgagtgtcactcagcaacactggtcacgtttggaaagaatattaaaaagagaaaaaaaacctgttcattttagtgttcaatttttttattattattgttgttcttatttaaccttgtaaaatatctataaatacaaaccaatttcattgtattctcactttgagggagatccagggggtgggaggggttgtggggagggggaaagcggagcactagaacacacaatctctctcccacgacaatctttttttattaaaagtctgctgttgtatactttaaaaacaggagtcctgcctcatgccccttccacaaaagaagaaaactttgttctgtgctgatgggttttttttgaactttgttttcttttaaagtctagtgccagactttggtatagtgcacagcttgaaattggttgggagcttagcaggtataactcaacggggacttaaatgtcacttgtaaaattaatccatatcttcgggtatttatagacttgcctttggcatgttggtggcaggtgtggcagacaaagaaatgtgtatcattcgtaacccagggaggtcagtaaagtttggaactctacagggaagattcttagtagatttgttaaggttttgttttgctctcagtcagcgctagtgatgtagaggcttgtacaggaggctgccagaggggaagcagcaagcaagactcaggcacacatgctctacaggtggctctttgtttgcctgaccaaagttctttgcaaatcttagcacagtttcaaactagtgacctgggaggagacggaaggggtgttgagcaggctgagctagctgctgaggtcaaagactgacgagcccagaggaaggggacaggccaggaatacatctcaccactgtgaataagtttttccagatttttttctaaaattacttcccttggaaagatacacttgagaggacattgtagttaaataatgtgaactgtaacagtcgtctactggtttatttttcatattttttaattgaaaattgagcttgcagaaatagccacattctacacatagttctaattttaaatccaaatctagaatctgtatttgttttttaacctcatgctttttacatttatttattgatgcatgtcagatggtaggaatattaaaaactatacatcagaatgatagtcacttatacctgctgactttataggaaagtgatgatataaatgtgtgtatatacattatatatacatatattcaatactgccttttttttttgtctacagtatcaaaattgactgattgaagcatgagaagaatgtttccctcacacccagttaagagtttttgtgtctgttttctttgtgtatcagtaaatggtgtaagaatcagtctctctttttgaagaaaaagcaatattccttggaatgcaaggaggattgaaggactatgtttgccgtgaggaaatagattttcatgactagtttgttttatacttttaaggttggcatctatgtgggccttatatactctaaaatgaactttagtcaccttggtgcttatgggccattacttgacctagaatctttaaggcacaatcagttgtacttcacatttaaagatcacttgagtgatggccgcctttccctcctacccgctccttccccacatgccttccaaggttagctggtaactgtagggctgcagagctgagcccttgcttgtgtgtaacttgccctcaccctcctcattgccaccttaggtcatgttatgggtcttgtcctccagagggttcggaaatggagtctgttggcagccctcctgcaggccctagcaccctgtcctgctccttaactgtgtgtgtgactctccaagagagttgtcctgcctgctgaagtgaaccagtacccagaaagacaactgtgagccatcttggttttcactggctgtttagctgaggtcttgggccacaaaaggggtttcacaaacctctggatatatcggagttcatgagaaaggaaacatgctcagtcaaaccaaatcaaacaaattgaattttatgttttataaagtgcttctgaaagctaagatttgaaagaagcctgaaatcagagtatttggcagcataactccttaaaggtaatggctttgatagaccattttcagacagaatttataaagaatctgaaaaggcaggtctgtgatagagaaatggacctgcgttcagatccaactgcccagcaagcgtttggatacagacattgctctggacgtggtatacttgccagagtccacaaaaatcagtgcttattttaggaaacaggttgccccccacaactggggtaaaagaagagagaaaagtcacgcttttctctcatttcattgtgtgtgcgcgtgcgtgtgtgtgtgtgtgtgtgtgtgtgtgtgtgtgtgggctgagatgtgtgatttttctttctcaaggatcatggtgggatcacagaactcttttatacaagtgagatccaggtctctgaatatctttttgtatataataataataataaaaagctcctcaccaaattcaagcttgtacattatattttctttctatgtttttaaatttaagttttattgttttgtatgtaaatatgtggacccaggaactgttattaatgagcaaaaagttactgttcagggcagtgattctgtttaataatcagacaaaatgtagacgagctttttaaagccatatagttttaactctgtacagtaggtaccggcctgtattattgtaacaataactctagcaatgtatagtgtatctatatagtttggagtgccttcgcttccatgtgtttgtttttgttttttttttaatttgttcctttttaaattttaattggtttcctgtatccatgtctccctgtccaccccctttccctttgaaataataactcactcataacagtatctttgccccttccacagttaagtttcagtgataccatactcaggagtgggaagaggaaaccatattcgtaatctcatttcgttcaagccctgcctttgtttttgttctgaatgtctgtttcctcctcagtagcagtgaccggtttcatttcatacttagtccattcagggacttagtgtagcaccagggagccctagagctggaggatatcgaatagactagattttgctcgtctcttccacaagccctaaccatgggtcttaaaaacagcagattctgggagccttccatgctctctctctctcctcttttatctacttccctcccaaatgagagagagagagaattggttttttataaatcgaagtttcttaatagtatcaggttttgatacgtcagtggtctaaaatgctatagtgcaattactagcagttactgcacggagtgccaccgtgccaatagaggactgttgttttaacaagggaactcctagcccatttcctccctcccgccatctctacccttgttcaatgaaatatcattttaatttctttctaaaaaatcagtttaattcttactgtgtgcccaacacgaaggccttttttgaaagaaaaatagagtgttttgcctcaaagtactccatataaaatgtcttgaatagaagaaaaaactaccaaaccaaaggttactatttttgaaacatcgtgtattcattccagcaaggcagaagactgcaccttctttccaatgacatgctgcgtcttttttttttaagtcctcttaatttttagacacacatttttggtttatgttttaacaaagtatgcctaaccagtcatcttgtctgcaccaatgcaaaggtttctgagaggactattatattctctatccctgtggatataaagacactggcatttcatctatttttcccttcctttttaaaggatttaactttggaatcttccaaaggaagtttggccaatgccagatccccagacatttggggggttttctttgttttcaactgaaattatatctgattcctactgttcatgttagtgatcatctaatcacagagccaaacactttcctcccctgtatagaaaagtaggtatgctttacaataaaatctgtcttttctggtggaaacctgagccactgaaaataaaagagacaactagaagcacagtagagtcccagactgagatctacctttgagaggctttgaaagtaatccctggggtttggattattttcacaagggttatgccgttttattcaagtttgttgctccgttttgcacctccacaataaaagcaaaatgacaaccagtacataaggggttagcttgacaaagtagacttccttgtgttaattttaaagttttttttccttactatatctgtctacaggcagatacagatagatgtatgaaaatctgcttgcctgtaaaatttgcatttataaatgtgttgccgatggatcacttgggcctgtacacataccaattagcgtgaccacttccatcttaaaaacaaacctaaaaaacaaaatttattatatatatatatatatatataaaggactgtgggttgtatacaaactattgcaaacacttgtgcaaatctgtcttgatataaaggaaaagcaaaatctgtataacattattactacttgaatgcctctgtgactgatttttttttttcattttaaatataaacttttttgtgaaaagtatgctcaatgttttttttccctttccccattcccttgtaaatacattttgttctatgtgacttggtttggaaatagttaactggtactgtaatttgcattaaataaaaagtaggttagcctggaaatgaaattaaaattcacaagtgtgtggtctttatttcagtacccaaccctcgttcttcaccctactattttgccactgcaatatgtagtcacatcaccatttccgttcctctaattagggaaacattaatctttgttatgaaaaacaagatatgaataccacttcttgttctttccaatgattttattccattgtgtagccccaagaggtgcagcttccatcttggaaacctttggatttgacgtagaggaagctttgcagacactgcttagaaaagaaagaaaacaactctgaaagggacagtttttaaacgtgtataagctgctgtctttgattactgtgttcatgatttggtgtggctgtattttcttttaactttcatcctattagtaatggtctttgggagtctctgtaaaatatatggacaccacaaacagtggggctgtacctcccaggtaaccaacacatgttgtgtttgagtctgctcatttccaatactggatgatgtatgtaaacatgttatgtctcttagtgcaaaaagaaacatcatttttttagggctggctcactctgtcaggcctaatctaaaggctagatataaggtcatgtgactgctgcttcaataaaaacaaatttatattcga

SEQ ID NO: 5 - DNA, 33 bp, Artificial sequence
  Target site sequence
aggaactgaatagagaccattagctttaatcat

SEQ ID NO: 6 - DNA, 20 bp, Artificial sequence
  Oligonucleotide motif
ttagttatcataattcaccc

SEQ ID NO: 7 - DNA, 18 bp, Artificial sequence
  Oligonucleotide motif
agttatcataattcaccc

SEQ ID NO: 8 - DNA, 16 bp, Artificial sequence
  Oligonucleotide motif
ttatcataattcaccc

SEQ ID NO: 9 - DNA, 14 bp, Artificial sequence
  Oligonucleotide motif
atcataattcaccc

SEQ ID NO: 10 - DNA, 20 bp, Artificial sequence
  Oligonucleotide motif
taatggtctctattcagttc

SEQ ID NO: 11 - DNA, 20 bp, Artificial sequence
  Oligonucleotide motif
ctaatggtctctattcagtt

SEQ ID NO: 12 - DNA, 18 bp, Artificial sequence
  Oligonucleotide motif
aatggtctctattcagtt

SEQ ID NO: 13 - DNA, 16 bp, Artificial sequence
  Oligonucleotide motif
atggtctctattcagt

SEQ ID NO: 14 - DNA, 14 bp, Artificial sequence
  Oligonucleotide motif
ggtctctattcagt

SEQ ID NO: 15 - DNA, 14 bp, Artificial sequence
  Oligonucleotide motif
ctaatggtctctat

SEQ ID NO: 16 - DNA, 20 bp, Artificial sequence
  Oligonucleotide motif
atgaaattggtttgtattta

SEQ ID NO: 17 - DNA, 14 bp, Artificial sequence
  Oligonucleotide motif
ttggtttgtattta

SEQ ID NO: 18 - DNA, 18 bp, Artificial sequence
  Oligonucleotide motif
atgaaattggtttgtatt

SEQ ID NO: 19 - DNA, 16 bp, Artificial sequence
  Oligonucleotide motif
atgaaattggtttgta

SEQ ID NO: 20 - DNA, 337 bp, Artificial sequence
  target site sequence
aggaactgaatagagaccattagctttaatcatcattgaccttctcaagtcttcaccccagatgtttagtgataggaggaactgaatagagaccattagctttaatcatcattgaccttctcaagtcttcaccccagatgtttagtgataggaggaactgaatagagaccattagctttaatcatcattgaccttctcaagtcttcacccaagatgtttagtgatagaaggaactgaatagagaccattagctttaatcatcattgaccttctcaagtcgtcacccaagatgtttagtgatagaaggaactgaatagagaccattagctttaatcat

1. An antisense oligonucleotide, of 10 to 50 nucleotides in length, which comprises a contiguous nucleotide sequence of 10 to 30 nucleotides in length which is at least 90% complementary, such as fully complementary, to a mammalian GSK3B target nucleic acid, wherein the antisense oligonucleotide is capable of reducing the expression of the mammalian GSK3B encoding target nucleic acid in a cell.

2. The antisense oligonucleotide according to claim 1, wherein the contiguous nucleotide sequence is at least 90% complementary, such as fully complementary to a sequence selected from the group consisting of SEQ ID NO: 1, 2, 3, and 4, or a naturally occurring variant thereof.

3. The antisense oligonucleotide according to claim 1, wherein the contiguous nucleotide sequence is at least 90% complementary, such as fully complementary, to an intron region present in the pre-mRNA of mammalian GSK3B target nucleic acid (e.g. SEQ ID NO 1).

4. The antisense oligonucleotide according to claim 1, wherein the contiguous nucleotide sequence is at least 90% complementary, such as fully complementary, to an intron region present in the pre-mRNA of human GSK3B, selected from position 1072-92178 of SEQ ID NO: 1; position 92373-147066 of SEQ ID NO: 1; position 147151-170934 of SEQ ID NO: 1; position 171046-178243 of SEQ ID NO: 1; position 178375-181607 of SEQ ID NO: 1; position 181715-188565 of SEQ ID NO: 1; position 188664-217909 of SEQ ID NO: 1; position 218006-230812 of SEQ ID NO: 1; position 231000-251064 of SEQ ID NO: 1 and position 251164-267562 of SEQ ID NO: 1.

5. The antisense oligonucleotide according to claim 1, wherein the contiguous nucleotide sequence is at least 90% complementary, such as fully complementary, to position 1072-92178 of the human pre-mRNA of mammalian GSK3B target nucleic acid, e.g. SEQ ID NO: 1; or position 181715-188565 of the human pre-mRNA of mammalian GSK3B target nucleic acid, e.g. SEQ ID NO: 1.

6. The antisense oligonucleotide according to claim 1, wherein the contiguous nucleotide sequence is at least 90% complementary, such as fully complementary, to SEQ ID NO 5 or SEQ ID NO: 20.

7. The antisense oligonucleotide according to claim 1, wherein the contiguous nucleotide sequence is at least 90% complementary, such as fully complementary to a target region of SEQ ID NO 1, selected from the group consisting of position 184511-184530, 184587-184606, 184663-184682, 184739-184758, 184815-184834; 184512-184531, 184588-184607, 184664-184683, 184740-184759, 184816-184835; 184512-184529, 184588-184605, 184664-184681, 184740-184757, 184816-184833; 184513-184528, 184589-184604, 184665-184680, 184741-184756, 184817-184832; 184513-184526, 184589-184602, 184665-184678, 184741-184754, 184817-184830; 184518-184531, 184594-184607, 184670-184683, 184746-184759, 184822-184835; 56154-56173, 56154-56171, 56154-56169, and 56154-56167 of SEQ ID NO 1.

8. The antisense oligonucleotide according to claim 1, wherein the contiguous nucleotide sequence is at least 90% complementary, such as fully complementary, to a target region of 10-22, such as 14-20, nucleotides in length of the target nucleic acid of SEQ ID NO: 1, wherein the target region is repeated at least 5 times across the target nucleic acid.

9. The antisense oligonucleotide according to claim 1, wherein the contiguous nucleotide sequence is at least 90% identical, such as is 100% identical to a sequence selected from the group consisting of SEQ ID NO: 10, 11, 12, 13, 14 and 15.

10. The antisense oligonucleotide according to claim 1, wherein the contiguous nucleotide sequence consists or comprises of a sequence selected from the group consisting of SEQ ID NO: 10, 11, 12, 13, 14 and 15.

11. The antisense oligonucleotide of claim 1, wherein the contiguous nucleotide sequence comprises one or more 2′ sugar modified nucleosides.

12. The antisense oligonucleotide of claim 11, wherein the one or more 2′ sugar modified nucleosides are independently selected from the group consisting of 2′-O-alkyl-RNA, 2′-O-methyl-RNA, 2′-alkoxy-RNA, 2′-O-methoxyethyl-RNA, 2′-amino-DNA, 2′-fluoro-DNA, arabino nucleic acid (ANA), 2′-fluoro-ANA and LNA nucleosides.

13. The antisense oligonucleotide of claim 11, wherein the one or more modified nucleosides are LNA nucleosides.

14. The antisense oligonucleotide of claim 11, where the contiguous nucleotide sequence comprises at least one modified internucleoside linkage.

15. The antisense oligonucleotide of claim 14, wherein at least 50% such as at least 75%, such as at least 90%, such as all of the internucleoside linkages within the contiguous nucleotide sequence are phosphorothioate internucleoside linkages.

16. The antisense oligonucleotide of claim 1, wherein the oligonucleotide is capable of recruiting RNase H.

17. The antisense oligonucleotide of claim 1, wherein the antisense oligonucleotide or contiguous nucleotide sequence thereof consists or comprises a gapmer of formula 5′-F-G-F′-3′, where region F and F′ independently comprise 1-8 nucleosides, of which 1-4 are 2′ sugar modified and define the 5′ and 3′ end of the F and F′ region, and G is a region between 6 and 16 nucleosides which are capable of recruiting RNaseH, such as a region comprising 6-16 DNA nucleosides.

18. The antisense oligonucleotide of claim 1, wherein the antisense oligonucleotide or contiguous nucleotide sequence thereof is selected from the group consisting of TAatggtctctattcagTTC (Compound ID 10_1); CTAatggtctctattcagTT (Compound ID 11_1); AATGgtctctattcaGTT (Compound ID 12_1); AATggtctctattcAGTT (Compound ID 12_2); ATGgtctctattCAGT (Compound ID 13_1); ATggtctctattCAGT (Compound ID 13_2); GGTctctattcAGT (Compound ID 14_1); CTAAtggtctCTAT (Compound ID 15_1); wherein capital letters represent LNA nucleosides, such as beta-D-oxy LNA, lower case letters represent DNA nucleosides, optionally all LNA C are 5-methyl cytosine, and at least one, preferably all internucleoside linkages are phosphorothioate internucleoside linkages.

19. A conjugate comprising the antisense oligonucleotide according to claim 1, and at least one conjugate moiety covalently attached to said oligonucleotide.

20. A pharmaceutically acceptable salt of the antisense gapmer oligonucleotide according to claim 1.

21. A pharmaceutical composition comprising the antisense oligonucleotide of claim 1 and a pharmaceutically acceptable diluent, solvent, carrier, salt and/or adjuvant.

22. An in vivo or in vitro method for reducing mammalian GSK3B expression in a target cell which is expressing the mammalian GSK3B, said method comprising administering the antisense oligonucleotide of claim 1 in an effective amount to said cell.

23. The antisense oligonucleotide of claim 1 for use in medicine.

24. The oligonucleotide of claim 1 for use in the prevention or alleviation of cancer, inflammatory diseases, neurological diseases, neurological injury, neuronal degeneration, psychiatric diseases and Type 2 diabetes.

25. Use of the antisense oligonucleotide of claim 1, for the preparation of a medicament for treatment or alleviation of cancer, inflammatory diseases, neurological diseases, neurological injury, neuronal degeneration, psychiatric diseases and Type 2 diabetes.
